(19) United States
(12) Patent Application Publication
(10) Pub. No.: US 2012/0107916 A1
(43) Pub. Date: May 3, 2012

(54) METHODS AND COMPOSITIONS FOR AFFECTING THE DIFFERENTIATION OF CLOSTRIDIA IN CULTURE

(76) Inventor: Donald Mattsson, Duluth, MN (US)

(21) Appl. No.: 13/379,390

(22) PCT Filed: Jun. 29, 2010
(86) PCT No.: PCT/US2010/040301

§ 371 Date: Dec. 20, 2011

Related U.S. Application Data
(60) Provisional application No. 61/221,996, filed on Jun. 30, 2009.

(51) Int. Cl. C12N 1/20; C07K 2/00

(52) U.S. Cl. 435/252.7; 530/300

(57) ABSTRACT

The invention relates generally to methods and compositions for maintaining and manipulating microbial cultures of Gram-positive bacteria. Also provided are methods for identifying quorum sensing regulatory proteins and auto-inducing peptides in Gram-positive bacteria. Also provided are methods and compositions for affecting quorum sensing pathways of the genus Clostridium in culture including auto-inducing peptides to direct or maintain Clostridium cultures in a desired differentiated state. Differentiated states include extended serial propagation for the production of butanol or other fermentation products.

[0001] This patent application claims benefit of priority to U.S. provisional patent application Ser. No. 61/221,996, filed Jun. 30, 2009, incorporated herein by reference in its entirety.

[0002] The instant application contains a lengthy Sequence Listing which has been submitted via text file, Annex C/ST.25.txt (.txt), in lieu of a printed paper (or .pdf) copy, and is hereby incorporated by reference in its entirety.

### FIELD OF THE INVENTION

[0003] The invention relates generally to methods and compositions for maintaining and manipulating microbial cultures of Gram-positive bacteria. Specifically the invention relates to methods and compositions for affecting quorum sensing pathways of the genus Clostridium in culture to direct or maintain Clostridia cultures in a desired differentiated state.

### BACKGROUND

[0004] The growth of the biofuels industry has been driven largely by increases in oil prices, which are not likely to decline in the coming years. Butanol, produced by fermentation, has attractive features as a biofuel such as higher energy content and lower volatility than ethanol. Butanol can also be used as a feedstock chemical for the chemical industry, replacing oil, while ethanol cannot. The production of acetone and butanol using Clostridium acetobutylicum was one of the first large-scale industrial fermentation processes ever developed. Subsequently, Clostridium beijerinckii and other species of solvent-producing Clostridia were used in commercial applications around the world. With increased oil production and lower oil prices from the 1950s and onward innovation in the biobutanol industry has waned.

[0005] The use of Clostridium to produce butanol or other solvents may be greatly improved if the various stages of culture could be controlled. When cultured in batch culture, growth of the solvent-producing Clostridia is initially exponential, with the production of acetate, butyrate, carbon dioxide, and hydrogen. As the culture progresses, the pH of the media drops, followed by slowed growth and the production of acetone, butanol, and ethanol. The metabolic shift from acid to solvent production is accomplished by genetic repression of acidogenic enzyme genes and induction of solventogenic enzyme genes. These changes are beneficial for butanol production and advantageous for the biofuels industry. However, many solvent-producing Clostridia lose the ability to produce solvents after repeated subculturing. This phenomenon known as degeneration reduces the usefulness of solvent producing Clostridia. There exists a long felt need to control the various differentiated states of Clostridia in culture, to establish and maintain continuous cultures of Clostridia, and to be able to establish repeated batch cultures while maintaining the capacity for solventogenesis. This ability would reduce degeneration in cultured Clostridia and enhance the usefulness of this organism for industrial applications such as the production of butanol.

### SUMMARY

[0006] One embodiment relates to autoinducing peptides which may be used to direct or maintain Clostridium in a desired differentiated state in culture.

[0007] Another embodiment relates to methods of using autoinducing peptides to modify the activity of quorum sensing regulatory proteins, to direct or maintain Clostridium in a desired differentiated state in culture.

[0008] In yet another embodiment relates to autoinducing peptides and methods used to extend serial propagation of Clostridium in culture.

[0009] Another embodiment relates to quorum sensing regulatory proteins, and methods and composition for modifying their activity to direct or maintain Clostridium in a desired differentiated state in culture.

[0010] In yet another embodiment, are methods for identifying autoinducing peptides and quorum sensing regulatory proteins in gram positive bacteria.

### DESCRIPTION OF THE FIGURES

[0011] FIG. 1 shows stationary phase growth measurements of Clostridium acetobutylicum ATCC 824 batch cultures during sequential transfers in YEPG medium. Spore stocks were germinated and grown anaerobically overnight at 30° C. before beginning sequential transfer every 24 hours of 75 μL of culture to 10 mL fresh YEPG. Cultures were grown for 96 hours after transfer before taking measurements. After germination the cultures were either not treated ( [symbol] ) or were treated with 1 nM ( [symbol] ), 10 nM ( [symbol] ) or 50 nM ( [symbol] ) of Peptide SEQ ID NO:143.

[0012] FIG. 2 shows pH measurements of stationary phase C. acetobutylicum ATCC 824 batch cultures during sequential transfers in YEPG medium. Spore stocks were germinated and grown anaerobically overnight at 30° C. before beginning sequential transfer every 24 hours of 75 μL of culture to 10 mL fresh YEPG. Cultures were grown for 96 hours after transfer before taking measurements. After germination the cultures were either not treated ( [symbol] ) or were treated with 1 nM ( [symbol] ), 10 nM ( [symbol] ) or 50 nM ( [symbol] ) of Peptide SEQ ID NO:143.

[0013] FIG. 3 shows ceric ion reactive compounds in stationary phase broths of C. acetobutylicum ATCC 824 batch cultures during sequential transfers in YEPG medium. Spore stocks were germinated and grown anaerobically overnight at 30° C. before beginning sequential transfer every 24 hours of 75 μL of culture to 10 mL fresh YEPG. Cultures were grown for 96 hours after transfer before taking measurements. After germination the cultures were either not treated ( [symbol] ) or were treated with 1 nM ( [symbol] ) 10 nM ( [symbol] ) or 50 nM ( [symbol] ) of Peptide SEQ ID NO:143.

[0014] FIG. 4 shows stationary phase growth measurements of C. beijerinckii NCIMB 8052 batch cultures during sequential transfers in YEPG medium. Spore stocks were germinated and grown anaerobically overnight at 30° C. before beginning sequential transfer every 24 hours of 75 μL of culture to 10 mL fresh YEPG. Cultures were grown for 96 hours after transfer before taking measurements. After germination the cultures were either not treated ( [symbol] ) or were treated with 1 nM ( [symbol] ), 10 nM ( [symbol] ) or 50 nM ( [symbol] ) of Peptide SEQ ID NO:145.

[0015] FIG. 5 shows pH measurements of stationary phase C. beijerinckii NCIMB 8052 batch cultures during sequential transfers in YEPG medium. Spore stocks were germinated and grown anaerobically overnight at 30° C. before beginning sequential transfer every 24 hours of 75 μL of culture to 10 mL fresh YEPG. Cultures were grown for 96 hours after transfer before taking measurements. After germination the cultures were either not treated ( [symbol] ) or were treated with 1 nM ( [symbol] ), 10 nM ( [symbol] ) or 50 nM ( [symbol] ) of Peptide SEQ ID NO:145.

[0016] FIG. 6 shows ceric ion reactive compounds in stationary phase broths of C. beijerinckii NCIMB 8052 batch cultures during sequential transfers in YEPG medium. Spore stocks were germinated and grown anaerobically overnight at 30° C. before beginning sequential transfer every 24 hours of 75 μL of culture to 10 mL fresh YEPG. Cultures were grown for 96 hours after transfer before taking measurements. After germination the cultures were either not treated ( [symbol] ) or were treated with 1 nM ( [symbol] ), 10 nM ( [symbol] ) or 50 nM ( [symbol] ) of Peptide SEQ ID NO:145.

[0017] FIG. 7 shows stationary phase growth measurements of C. acetobutylicum ATCC 824 batch cultures grown at 37° C. during sequential transfers in YEPG medium. Spore stocks were germinated in the absence of ( [symbol] ) and presence of ( [symbol] ) 50 nM Peptide SEQ ID NO:143. Germinating cultures were grown anaerobically overnight at 37° C. before beginning sequential transfer every 24 hours of 10 μL of culture to 10 mL fresh YEPG. The culture germinated in the presence of added peptide was transferred only to fresh medium that contained added peptide ( [symbol] ). The culture germinated without added peptide was transferred to fresh medium without added peptide ( [symbol] ), and to fresh medium that contained added peptide ( [symbol] ). Cultures were grown for 72 hours after transfer before taking measurements.

[0018] FIG. 8 shows pH measurements of stationary phase C. acetobutylicum ATCC 824 batch cultures grown at 37° C. during sequential transfers in YEPG medium. Spore stocks were germinated in the absence of ( [symbol] ) and presence of ( [symbol] ) 50 nM Peptide SEQ ID NO:143. Germinating cultures were grown anaerobically overnight at 37° C. before beginning sequential transfer every 24 hours of 10 μL of culture to 10 mL fresh YEPG. The culture germinated in the presence of added peptide was transferred only to fresh medium that contained added peptide ( [symbol] ). The culture germinated without added peptide was transferred to fresh medium without added peptide ( [symbol] ), and to fresh medium that contained added peptide ( [symbol] ). Cultures were grown for 72 hours after transfer before taking measurements.

[0019] FIG. 9 shows ceric ion reactive compounds in stationary phase broths of C. acetobutylicum ATCC 824 batch cultures grown at 37° C. during sequential transfers in YEPG medium. Spore stocks were germinated in the absence of ( [symbol] ) and presence of ( [symbol] ) 50 nM Peptide SEQ ID NO:143. Germinated cultures were grown anaerobically overnight at 37° C. before beginning sequential transfer every 24 hours of 10 μL of culture to 10 mL fresh YEPG. The culture germinated in the presence of added peptide was transferred only to fresh medium that contained added peptide ( [symbol] ). The culture germinated without added peptide was transferred to fresh medium without added peptide ( [symbol] ), and to fresh medium that contained added peptide ( [symbol] ). Cultures were grown for 72 hours after transfer before taking measurements.

[0020] FIG. 10 shows stationary phase growth measurements of C. beijerinckii NCIMB 8052 batch cultures grown at 37° C. during sequential transfers in YEPG medium. Spore stocks were germinated in the absence of ( [symbol] ) and presence of ( [symbol] ) 50 nM Peptide SEQ ID NO:145. Germinating cultures were grown anaerobically overnight at 37° C. before beginning sequential transfer every 24 hours of 10 μL of culture to 10 mL fresh YEPG. The culture germinated in the presence of added peptide was transferred only to fresh medium that contained added peptide ( [symbol] ). The culture germinated without added peptide was transferred to fresh medium without added peptide ( [symbol] ), and to fresh medium that contained added peptide ( [symbol] ). Cultures were grown for 72 hours after transfer before taking measurements

[0021] FIG. 11 shows pH measurements of stationary phase C. beijerinckii NCIMB 8052 batch cultures grown at 37° C. during sequential transfers in YEPG medium. Spore stocks were germinated in the absence of ( [symbol] ) and presence of ( [symbol] ) 50 nM Peptide SEQ ID NO:145. Germinating cultures were grown anaerobically overnight at 37° C. before beginning sequential transfer every 24 hours of 10 μL of culture to 10 mL fresh YEPG. The culture germinated in the presence of added peptide was transferred only to fresh medium that contained added peptide ( [symbol] ). The culture germinated without added peptide was transferred to fresh medium without added peptide ( [symbol] ), and to fresh medium that contained added peptide ( [symbol] ). Cultures were grown for 72 hours after transfer before taking measurements.

[0022] FIG. 12 shows ceric ion reactive compounds in stationary phase broths of C. beijerinckii NCIMB 8052 batch cultures grown at 37° C. during sequential transfers in YEPG medium. Spore stocks were germinated in the absence of ( [symbol] ) and presence of ( [symbol] ) 50 nM Peptide SEQ ID NO:145. Germinating cultures were grown anaerobically overnight at 37° C. before beginning sequential transfer every 24 hours of 10 μL of culture to 10 mL fresh YEPG. The culture germinated in the presence of added peptide was transferred only to fresh medium that contained added peptide ( [symbol] ). The culture germinated without added peptide was transferred to fresh medium without added peptide ( [symbol] ), and to fresh medium that contained added peptide ( [symbol] ). Cultures were grown for 72 hours after transfer before taking measurements.

### DETAILED DESCRIPTION

[0023] Disclosed are methods and compositions to manipulate or modify organisms of the genus Clostridium in culture. Specifically disclosed are methods and compositions directed at reducing or delaying the degeneration of a Clostridium culture, whereby the culture stops producing solvents and produces only organic acids. More specifically, these methods and compositions are aimed at directing Clostridium organisms towards a particular differentiated state, or for enhancing or diminishing a particular differentiated state of Clostridium organisms in culture. Such differentiated states include but are not limited to exponential growth, solventogenesis, acidogenesis, granulose synthesis, extended serial propagation or the ability of cells to propagate solventogenic cultures serially, and sporogenesis.

[0024] Clostridium cultures are typically initiated from spores under anaerobic conditions. They are allowed to grow in exponential growth phase where they produce acetic and butyric acids and eventually shift their metabolism to solvent production. The metabolic shift typically corresponds to a pH of about 4.8 or lower, depending on the species. Clostridium cultures may also be initiated with active organisms instead of spores. The use of active organisms is preferable because it eliminates the germination stage and allows the culture to enter the exponential growth phase rapidly. The use of active cultures suffers from a significant limitation where after inoculation of 2 to 3 sequential batch cultures or the equivalent number of generations in continuous culture the culture degenerates, in that it stops producing butanol or other solvents and returns to producing only organic acids.

[0025] A method of manipulating or modifying the various stages of differentiated Clostridium culture is highly desirable. For example, it may be desirable to begin exponential growth earlier to increase the initial number of organisms in the culture. It may be desirable to begin solventogenesis earlier and maintain it longer to maximize the fermentation of butanol or other solvents. It may also be desirable at times to initiate granulose synthesis and generate granulose storage cells or clostridial from cells. The ability to extend sequential batch cultures or continuous cultures using inoculums of active cultures instead of spores, with the cultures being fully capable of butanol production is highly desirable for efficient and economic butanol production. In addition, the ability to generate spores is desirable for intermediate or long term storage of Clostridium organisms. Particularly, it is highly desirable to avoid culture degeneration and to be able to extend sequential batch cultures or continuous cultures from active cultures while maintaining the ability to produce butanol. The molecular mechanisms underlying the shift towards one differentiated state or another, or towards culture degeneration are not known. However, a long felt need exists for a method of directing or maintaining differentiation in Clostridium cultures.

[0026] Observations of synchronous behavior of Clostridium organisms in culture suggested to the Inventor that quorum sensing mechanisms may be operating. Quorum sensing is a mechanism by which populations of bacteria coordinate some aspect of their behavior according to the local density of their population. For example, in Bacillus, gene expression can be regulated according to population density by recognition of oligopeptide autoinducing peptides in the culture media that directly bind to effector proteins in responding cells (Bongiorni, et al., (2005), J. of Bacteriology, 187: 4353-4361). No such system is known in Clostridium. However the Inventor reasoned that a similar system, if present in Clostridium, may be manipulated to induce or maintain the various differentiated stages of culture, including but not limited to exponential growth, solventogenesis, acidogenesis, granulose synthesis, extended serial propagation, and sporogenesis. In one embodiment, a peptide with a sequence corresponding to an autoinducing peptide is added to the culture medium of a Clostridium culture in sufficient amount to affect quorum sensing regulatory proteins in responding cells, and thereby directs or maintains the culture in a desired differentiated state. By providing an effective amount of autoinducing peptide or peptides, the various differentiated states may be initiated or maintained.

[0027] To manipulate or modify Clostridium cultures in the described manner it is first necessary to identify specific autoinducing peptides and/or their quorum sensing regulatory proteins. Although quorum sensing pathways are known in other bacterial genera, it is difficult or impossible to predict which, if any quorum sensing pathway may be active in another bacterial genus or which regulatory function may be assigned, and which if any autoinducing peptide will activate or deactivate that pathway.

### I. Quorum Sensing Regulatory Pathways

[0028] The first step in the discovery of quorum sensing pathways in Clostridium was to indentify quorum sensing regulatory proteins. Although quorum sensing regulatory proteins are not known in Clostridium, it was reasoned that a putative quorum sensing regulatory protein may share conserved sequences with quorum sensing regulatory proteins of other species. For example, PlcR is a virulence regulator of Bacillus cereus (see Declerck et al., (2007), Proc. Natl. Acad. Sci., 104:18490-18495). PapR is an autoinducing peptide that promotes virulence in B. cereus. PapR is secreted by B. cereus and then imported back into the cell across the cell membrane. Increased bacterial densities result in increased PapR concentrations in the media and inside the bacteria, thereby allowing increased interaction of PapR with PlcR. A PapR:PlcR complex is formed, which binds to a specific DNA recognition site, a palindromic PlcR box, that activates a positive feedback loop to up-regulate the expression of PlcR, PapR, as well as various other B. cereus virulence factors. The PapR gene is located 70 by down stream from PlcR. It encodes a 48 amino acid peptide which is secreted, then imported back into the bacteria by an oligopermease in the cell membrane. It is thought that once internalized, PapR undergoes further processing and that a heptapeptide derived from PapR interacts with PlcR, which allows binding to its DNA target thereby activating PlcR regulatory mechanisms. The PlcR protein is known to contain 11 helices, which form five tetratricopeptide repeats (TPR). The structure of PlcR is also similar to the structure of PrgX, an autoinducing peptide of another gram-positive bacteria Enterococcus faecalis. However, PlcR and PrgX control different processes in these different bacterial genera. PlcR, PrgX, the Bacillus thuringiensis NprR protein, and the Rap family of proteins in Bacillus, all possess TPR units. These proteins belong to a superfamily of proteins known as RNPP for Rap/NprR/PlcR/PrgX. Despite structural similarities within this superfamily it is not possible to predict which if any function may be attributed to a particular quorum sensing regulatory protein pathway or which if any autoinducing peptides may activate that pathway.

[0029] It was reasoned that if regulatory sequences were present in Clostridium they may possess tetratricopeptide repeats or share homology to PlcR and other members of the RNPP superfamily. In addition, since genes for autoinducing peptides may share genetic regulation factors with genes for their quorum sensing regulatory protein targets, they may be located in close proximity in the genome and possibly downstream from the regulatory protein genes. It was also reasoned that since quorum sensing autoinducing peptides require export from the bacterium, they may be associated with polypeptide secretory sequence signals. Finally, since an active autoinducing peptide sequence may be the result of proteolytic modification of the gene product, the actions of proteases on the putative sequences were considered.

[0030] PlcR and PrgX as well as other members of the RNPP family were used to search for homologs among predicted protein sequences in genomic sequence data for solventogenic Clostridia using PSI Blast. Using this approach 46 suspected quorum sensing regulatory protein sequences were identified in C. acetobutylicum ATCC 824 (Table 2) and 28 in C. beijerinckii NCIMB 8052 (Table 3). When regions downstream from suspected quorum sensing regulatory protein sequences were examined for encoded polypeptides, 33 were identified in C. acetobutylicum ATCC 824 (Table 5) and 19 in C. beijerinckii NCIMB 8052 (Table 6). When examining these sequences for putative autoinducing peptides associated with secretory signals, 4 peptides in C. acetobutylicum ATCC 824 and 1 peptide in C. beijerinckii NCIMB 8052 were identified (Table 7). From these 5 sequences, 3 possessed attributes present in other quorum sensing systems. These 3 sequences were used to further search against the genomes of C. acetobutylicum and C. beijerinckii, and 2 additional sequences were identified (Table 8). Utilizing this strategy has lead to the discovered of a new class of quorum sensing regulatory pathways, quorum sensing regulatory proteins, and autoinducing peptides belonging to the genus Clostridium. These quorum sensing regulatory proteins and/or their respective autoinducing peptides may be manipulated or modified to control events such as exponential growth, solventogenesis, acidogenesis, granulose synthesis, extended serial propagation, and sporogenesis.

[0031] The modification of any component of a quorum sensing regulatory pathway may direct or maintain a culture of Clostridium organisms in a desired differentiated state. One non-limiting example includes the use of autoinducing peptides in the Clostridium culture media. In addition to the use of autoinducing peptides, other non-limiting examples include altering or modifying the transcription, translation, or post-translational modification of quorum sensing regulatory proteins, oligopermeases, or autoinducing peptides. The modification through genetic engineering or other means of any quorum sensing pathway component may result, for example, in changes to the export or uptake of autoinducing peptides, the interaction of autoinducing peptides with either quorum sensing regulatory proteins, oligopermeases, or other relevant components, and successfully manipulate or modify the behavior of Clostridium organisms in culture.

[0032] In one embodiment, an effective amount of autoinducing peptide or peptides may be added singly or in combination, initially or continuously, to the culture medium of a Clostridium culture, at any stage of cell culture, to maintain or achieve a desired differentiated state. Any stage of culture includes but is not limited to: inoculation; growth phase including, lag, exponential, and stationary phases; death phase; acidogenic phase; solventogenic phase; sporogenesis phase; just prior to removal of organisms for inoculation of a subsequent batch or continuous culture; and a time just after signs of culture degeneration are detected.

[0033] In one preferred embodiment, an effective amount of autoinducing peptide or peptides are added to the media of a culture of a butanol producing strain of Clostridium at inoculation or during culture to maintain or increase the degree and duration of solvent formation during batch, sequential batch, fed-batch or semi-continuous culture, or continuous culture. Non-limiting examples of preferred autoinducing peptides are set forth in SEQ ID NO: 143, SEQ ID NO: 144, SEQ ID NO: 145, SEQ ID NO: 146, SEQ ID NO: 147 and SEQ ID NO: 148.

[0034] In another embodiment, an effective amount of autoinducing peptide or peptides are added to the media of a culture of a butanol producing strain of Clostridium at inoculation or during culture to extend serial propagation of the culture and maintain or increase the degree and duration of solvent formation during batch, sequential batch, fed-batch or semi-continuous culture, or continuous culture. Non-limiting examples of preferred autoinducing peptides are set forth in SEQ ID NO: 143, SEQ ID NO: 144, SEQ ID NO: 145, SEQ ID NO: 146, SEQ ID NO: 147 and SEQ ID NO: 148.

[0035] In another embodiment, an effective amount of autoinducing peptide or peptides as set forth in SEQ ID NO: 143, SEQ ID NO: 144, SEQ ID NO: 146, and SEQ ID NO: 148 is added to the media of Clostridium acetobutylicum during culture to maintain or increase the degree and duration of solvent formation during batch, sequential batch, fed-batch or semi-continuous culture, or continuous culture.

[0036] In another embodiment, an effective amount of autoinducing peptide or peptide as set forth in SEQ ID NO: 145, and SEQ ID NO: 147 is added to the media of Clostridium beijerinckii during culture to maintain or increase the degree and duration of solvent formation during batch, sequential batch, fed-batch or semi-continuous culture, or continuous culture.

[0037] In yet another embodiment, the genetic regulation of autoinducing peptide production by the Clostridia may be genetically engineered whereby the autoinducing peptide is increased or decreased, thereby providing elevated or diminished levels of autoinducing peptides in the culture media. Alternatively, any cell capable of co-culture with Clostridium may be genetically engineered to secrete an autoinducing peptide into the culture media thereby providing a source of autoinducing peptide or peptides.

[0038] In yet another embodiment, the quorum sensing regulatory protein may be altered to activate or deactivate the quorum sensing pathway. By way of example, a genetically engineered Clostridium organism may possess a quorum sensing regulatory protein that performs its translational regulatory function without the requirement of binding an autoinducer peptide. Non-limiting examples of quorum sensing regulatory proteins are set forth in SEQ ID NO: 17 through SEQ ID NO:142.

[0039] In yet another embodiment, the expression or function of a quorum sensing regulatory protein is reduced or eliminated in order to direct or maintain an organism in a desired differentiated state. By way of example, a quorum sensing regulatory protein that has an inhibitory effect on extended serial propagation is reduced or eliminated using genetic engineering methods to produce what is commonly known as a knock-out organism. Such an organism lacking the inhibitory regulatory function may be directed to or maintained in a state of extended serial propagation. Non-limiting examples of inhibitory regulatory proteins include SEQ ID NO: 26 and SEQ ID NO: 145.In yet another embodiment the oligopermeases of a quorum sensing regulatory pathway may be altered to increase or decrease the amount of autoinducing peptide inside the bacterium. By way of example a genetically engineered Clostridium organism with increased numbers of oligopermeases may result in increased import of specific autoinducing peptides into the bacterium thereby activating greater numbers of quorum sensing regulatory proteins resulting in an elevated cellular response.

[0040] In yet another embodiment is a method of identifying quorum sensing regulatory proteins in Clostridium organisms by searching a Clostridium genome, and identifying encoded polypeptides with TPRs, or homology with RNPP proteins. Non-limiting examples of Clostridium genomes are set forth in SEQ ID NO:14, SEQ ID NO:15 and SEQ ID NO:16. Non-limiting examples of RNPP proteins are set forth in SEQ ID NO:1 through SEQ ID NO:13.

[0041] In yet another embodiment is a method of identifying autoinducing peptides in Clostridium by searching a Clostridium genome and identifying polypeptides in close linear proximity to quorum sensing regulatory proteins and also close linear proximity to Clostridium secretory signal proteins.

[0042] In yet another embodiment is a method of identifying autoinducing peptides in any Gram positive bacteria by searching a Gram positive bacteria genome and identifying polypeptides in close linear proximity to quorum sensing regulatory proteins and also close linear proximity to Gram positive bacteria secretory signal proteins.

[0043] The aforementioned alterations or genetic modifications are well known in the art and may include any number of changes in, for example, gene regulatory regions, or protein coding regions, including insertions, deletions, frame shift mutations and point mutations, alteration of stop codons and knock-out mutations. These elements of the inventors' methodology are generally well known and described in detail in numerous laboratory protocols, two of which are Molecular Cloning 2nd edition, (1989), Sambrook, J., Fritsch, E. F. and Maniatis, J., Cold Spring Harbor, and Molecular Cloning 3rd edition, (2001), J. F. Sambrook and D. W. Russell, ed., Cold Spring Harbor University Press, incorporated herein in their entirety by reference. Any number of methods known in the art may be used to accomplish the genetic alterations or modifications in Clostridium. One example includes a method that uses a genetic vector that is based on a modified Group II introns. In particular, the Lactococcus lactis L1.LtrB Group II intron as described in WO 2007/148091, and incorporated herein by reference in its entirety. The method allows targeted, stable disruption of any gene for which the sequence is known by incorporating a specific target sequence into the vector, which also contains a selectable marker. Following genetic transformation of cells the vector integrates into the targeted gene, based on the target sequence, and integrants are selected by virtue of the selectable marker. Finally, the selectable marker is excised from the integrated vector by the activity of a specific recombinase enzyme and the selectable phenotype is lost, while the remainder of the vector remains in the targeted integration site disrupting the targeted gene. In more detail, the vector contains a modified Group II intron which does not express the intron-encoded reverse transcriptase but which does contain a modified selectable marker gene in the reverse orientation relative to the modified Group II intron, wherein the selectable marker gene comprises a region encoding a selectable marker and a promoter operably linked to said region, which promoter is capable of causing expression of the selectable marker encoded by a single copy of the selectable marker gene in an amount sufficient for the selectable marker to alter the phenotype of a bacterial cell of the class Clostridia such that it can be distinguished from the bacterial cell of the class. Clostridia lacking the selectable marker gene; and a promoter for transcription of the modified Group II intron, said promoter being operably linked to said modified Group II intron; and wherein the modified selectable marker gene contains a Group I intron positioned in the forward orientation relative to the modified Group II intron so as to disrupt expression of the selectable marker; and wherein the DNA molecule allows for removal of the Group I intron from the RNA transcript of the modified Group II intron to leave a region encoding the selectable marker and allows for insertion of said RNA transcript (or a DNA copy thereof) at a site in a DNA molecule in a bacterial cell of the class Clostridia. One example of a selectable marker may be a gene for a particular antibiotic resistance, thus selection is accomplished by exposing the cells in culture to the particular antibiotic. The modified Group II intron described above can also contain specific targeting portion, which allow for the insertion of the RNA transcript of the modified Group II intron into a site within a DNA molecule in the clostridial cell. Typically, the site is a selected site, and the targeting portions of the modified Group II intron are chosen to target the selected site. Non-limiting examples of target sites may be quorum sensing regulatory proteins or autoinducing peptides. Preferably, the selected site is in the chromosomal DNA of the Clostridial cell. Typically, the selected site is within a particular gene, or within a portion of DNA which affects the expression of a particular gene, or within a portion of DNA which affects the expression of a particular gene. Insertion of the modified Group II intron at such a site typically disrupts the expression of the gene and leads to a change in phenotype. By way of example, if the quorum sensing regulatory protein is inhibiting extended serial propagation, the inhibition would be removed, and the phenotype would change towards extended serial propagation. Other examples of target sites include autoinducing peptides which may be modified by the insertion of alternative promoters or multiple copies of genes for the autoinducing peptides which result in production or increased production of the particular autoinducing peptide. The selectable marker gene or its coding region may be associated with regions of DNA for example flanked by regions of DNA that allow for the excision of the selectable marker gene or its coding region following its incorporation into the chromosome. Thus, a clone of a mutant Clostridial cell expressing the selectable marker is selected and manipulated to allow for removal of the selectable marker gene. Recombinases may be used to excise the region of DNA. Recombinases may be endogenous or exogenous. Typically, recombinases recognize particular DNA sequences flanking the region that is excised. Cre recombinase or FLP recombinase are preferred recombinases. Alternatively, an extremely rare-cutting restriction enzyme could be used, to cut the DNA molecule at restriction sites introduced flanking the selectable marker gene or its region. A mutant bacterial cell from which the selectable marker gene has been excised retains the Group II intron insertion. Accordingly, it has the same phenotype due to the insertion with or without the selectable marker gene. Such a mutant bacterial cell can be subjected to a further mutation by the same method described above.

### II. Peptides

[0044] Any method known in the art may be employed for the synthesis of peptides including but not limited to liquid phase, solid phase, or the use of recombinant organisms genetically engineered to express the selected polypeptide sequence. Peptides may be obtained from any number of commercial suppliers. Peptides once obtained may be used to prepare stock solutions where by they are dissolved in an appropriate solvent at concentrations to facilitate adding the peptide to a culture in an effective amount.

### A. Effective Amounts

[0045] With respect to effective amounts of autoinducing peptides the term “effective amount” is the amount of autoinducing peptide per liter that is required to manipulate or modify the various differentiated states of Clostridium in culture. That amount will vary depending on the particular autoinducing peptide, the particular strain of Clostridium, the culture conditions used, and the particular effect that is desired. It is expected that optimum effective amounts will be determined empirically. One of ordinary skill in the art will add an amount of peptide or peptides to the culture, and determine the degree and state of culture differentiation. It may be desirable to initiate cultures with an effective amount of autoinducing peptide and/or it may be desirable to monitor and maintain effective amounts of autoinducing peptides over a period of time. If desired, a sample of media may be removed from the culture and the concentration of autoinducing peptide analyzed through any method known in the art, for example by HPLC or immunochemical methods, and autoinducing peptides added accordingly. Examples of effective amounts of autoinducing peptide, expressed as amounts present in one liter, are expected to range from about 1 to about 100 picomoles, from about 100 to about 200 picomoles, from about 200 to about 300 picomoles, from about 300 to about 400 picomoles, from about 400 to about 500 picomoles, from about 500 to about 600 picomoles, from about 600 to about 700 picomoles, from about 700 to about 800 picomoles, from about 800 to about 900 picomoles or from about 900 to about 1000 picomoles, from about 1 to about 100 nanomoles, from about 100 to about 200 nanomoles, from about 200 to about 300 nanomoles, from about 300 to about 400 nanomoles, from about 400 to about 500 nanomoles, from about 500 to about 600 nanomoles, from about 600 to about 700 nanomoles, from about 700 to about 800 nanomoles, from about 800 to about 900 nanomoles or from about 900 to about 1000 nanomoles, from about 1 to about 100 micromoles, from about 100 to about 200 micromoles, from about 200 to about 300 micromoles, from about 300 to about 400 micromoles, from about 400 to about 500 micromoles, from about 500 to about 600 micromoles, from about 600 to about 700 micromoles, from about 700 to about 800 micromoles, from about 800 to about 900 micromoles or from about 900 to about 1000 micromoles. Preferably 100 picomoles to 1 micromole per liter. More preferably 1 nanomoles to 100 nanomoles per liter, and most preferably 10 nanomoles to 70 nanomoles per liter.

### B. Sequence Variation

[0046] It is well known that a certain amount of sequence variation may occur in polypeptides without affecting their function. It is expected that peptides closely resembling but not identical to the sequences disclosed herein may possess essentially the same function as their corresponding peptides or polypeptides and be used to practice the invention. It is expected that peptides or polypeptides with amino acid sequences which are 99 percent, 98 percent, 97 percent, 95 percent, 90 percent, 85 percent, 80 percent, 75 percent, 70 percent, 65 percent, 60 percent, 55 percent, or 50 percent identical to the autoinducing peptides or quorum sensing regulatory proteins disclosed herein may be used to practice the invention.

[0047] Sequence identity or “percent identity” is intended to mean the percentage of same residues between two sequences. In sequence comparisons, the two sequences being compared are aligned using the Clustal method (Higgins et al, (1992), Cabios, 8:189-191), of multiple sequence alignment in the Lasergene biocomputing software (DNASTAR, INC, Madison, Wis.). In this method, multiple alignments are carried out in a progressive manner, in which larger and larger alignment groups are assembled using similarity scores calculated from a series of pairwise alignments. Optimal sequence alignments are obtained by finding the maximum alignment score, which is the average of all scores between the separate residues in the alignment, determined from a residue weight table representing the probability of a given amino acid change occurring in two related proteins over a given evolutionary interval. Penalties for opening and lengthening gaps in the alignment contribute to the score. The default parameters used with this program are as follows: gap penalty for multiple alignment=10; gap length penalty for multiple alignment=10; k-tuple value in pairwise alignment=1; gap penalty in pairwise alignment=3; window value in pairwise alignment=5; diagonals saved in pairwise alignment=5. The residue weight table used for the alignment program is PAM250 (Dayhoff et al., in Atlas of Protein Sequence and Structure, Dayhoff, Ed., NBRF, Washington, Vol. 5, suppl. 3, p. 345, 1978).

[0048] It is well-known in the biological arts that certain amino acid substitutions may be made in protein sequences without affecting the function of the protein. Generally, conservative amino acid substitutions or substitutions of similar amino acids are tolerated without affecting protein function. Similar amino acids can be those that are similar in size and/or charge properties, for example, aspartate and glutamate, and isoleucine and valine, are both pairs of similar amino acids. Similarity between amino acid pairs has been assessed in the art in a number of ways. For example, Dayhoff et al. (1978), in Atlas of protein Sequence and Structure, Volume 5, Supplement 3, Chapter 22, pp. 345-352, which is incorporated by reference herein, provides frequency tables for amino acid substitutions which can be employed as a measure of amino acid similarity. Dayhoff et al.'s frequency tables are based on comparisons of amino acid sequences for proteins having the same fraction from a variety of evolutionarily different sources.

[0049] It is also expected that less then the entire peptide or polypeptide sequence may possess essentially the same function as their corresponding autoinducing peptides or quorum sensing regulatory proteins disclosed herein. By way of example a polypeptide comprising any 5 consecutive or contiguous amino acids as set forth herein, may be used to practice the invention.

### D. Compositions

[0050] It is envisioned that certain compositions may facilitate the manipulation or modification of Clostridium cultures. Non-limiting examples include autoinducing peptides with amino acid sequences corresponding to natural occurring autoinducing peptides. Also included are autoinducing peptides with amino acid sequences derived in some way from natural occurring autoinducing peptides, including those with amino acid deletions or substitutions. Autoinducing peptides may be prepared alone or in combinations. Autoinducing peptides may be further combined with Clostridium organisms in any form, including growing organisms or spores. Autoinducing peptides may also be combined with any media capable of sustaining Clostridium cultures. Peptides with amino acid sequences corresponding to autoinducing peptides may be prepared in any formulation compatible with Clostridium culture. Such formulations may include autoinducing peptides in predetermined or effective amounts which manipulate or modify the various differentiated states of Clostridium in culture. Formulations may include sustained release formulations or formulations designed to release autoinducing peptides upon certain changes in the culture such as for example pH. Many such formulations are well known particularly to those skilled in the pharmaceutical or nutritional arts and may be easily adapted to Clostridium culture. Non-limiting examples are represented in U.S. Pat. Nos. 6,465,014 and 6,251,430 herein incorporated by reference in their entirety.

### III. Clostridium Cultures

### A. Clostridium

[0051] In general, the invention may be practiced on any strain of Clostridium of which an autoinducing peptide and/or quorum sensing regulatory proteins have been identified. For purposes of butanol fermentation any strain of Clostridium which forms primarily butanol may be employed. Preferred strains included Clostridium acetobutylicum ATCC 824, and Clostridium beijerinckii NCIMB 8052, which are available from the American Type Culture Collection, Rockville, Md. It is also expected that the invention may be practiced on any organisms which are within the same genetic lineage as C. acetobutylicum ATCC 824 or C. beijerinckii NCIMB 8052. Also included are organisms derived from C. acetobutylicum ATCC 824 or C. beijerinckii NCIMB 8052 by methods of genetic modification or other means. Non-limiting example of organisms within the same genetic lineage as Clostridium acetobutylicum include ATCC 824^{T} (=DSM 792^{T}=NRRL B527^{T}), ATCC 3625, DSM 1733 (=NCIMB 6441), NCIMB 6442, NCIMB 6443, ATCC 43084, ATCC 17792, DSM 1731 (=ATCC 4259=NCIMB 619=NRRL B530), DSM 1737, DSM 1732 (=NCIMB 2951), ATCC 39236, and ATCC 8529 (=DSM 1738). See Keis et al., (2001), International Journal of Systematic and Evolutionary Microbiology, 51: 2095-2103, incorporated herein in its entirety by reference. Non-limiting examples of organisms within the same genetic lineage as Clostridium beijerinckii include NCIMB 9362^{T}, NCIMB 11373, NCIMB 8052 (=DSM 1739=ATCC 10132=NRRL B594), NCIMB 8049, NCIMB 6444, NCIMB 6445, NCIMB 8653, NRRL 8591, NRRL B597, 214, 4J9, NCP 193, NCP 172(B), NCP 259, NCP 261, NCP 263, NCP 264, NCP 270, NCP 271, NCP 200(B), NCP 202(B), NCP 280, NCP 272(B), NCP 265(B), NCP 260, NCP 254(B), NCP 106, BAS/B/SW/136, BAS/B3/SW/336(B), BAS/B/136, ATCC 39058, NRRL B593, ATCC 17791, NRRL B592, NRRL B466, NCIMB 9503, NCIMB 9504, NCIMB 9579, NCIMB 9580, NCIMB 9581, NCIMB 12404, ATCC 17795, IAM 19015, ATCC 6014, ATCC 6015, ATCC 14823, ATCC 11914, and BA101. Id.

### B. Culture Methods

[0052] Typically the fermentation process is initiated by inoculating a seed culture or relatively small volume of sterile medium or distilled water under anaerobic conditions. The inoculum may be either Clostridium spores or active Clostridium organisms. The seed culture may allow the germination of spores and/or an increase in the initial number of organisms. The seed culture is then transferred to a larger volume of sterile media in a fermentor and fermented at a temperature from about 30° C. to about 40° C. Any type of Clostridium culture may be initiated using this method. Alternatively the fermentation vessel containing sterile medium may be inoculated directly.

[0053] Clostridium cultures may be subjected to any culture method or fermentation process known in the art, including but not limited to batch, fed batch or semi-continuous, continuous, or a combination of these processes. If batch culture or batch fermentation is employed, Clostridium cultures may be initiated as described above. The culture medium containing the inoculated organism may be fermented from about 30 hours to about 275 hours, preferably from about 45 hours to about 265 hours, at a temperature of from about 30° C. to about 40° C., preferably about 33° C. Preferably, sterilized nitrogen gas is sparged through the fermentor to aid mixing and to exclude oxygen.

[0054] If fed batch or semi-continuous culture or semi-continuous fermentation is employed, cultures may be initiated in the same manner as employed in batch fermentation, however after a period of time additional substrate is added to the fermentor. The culture medium containing the inoculated organism may then be fermented at a temperature from about 30° C. to about 40° C., preferably about 33° C. Sterile substrate may be added with or without monitoring the components of the culture. Growth rate may be controlled by the addition of substrate. Cultures may be initiated with lower amounts of initial substrate, and additional substrate feed to the reactor as the initial substrate is consumed. The use of fed batch or semi-continuous culture or fermentation may enable a higher yield of product from a given amount of substrate.

[0055] If continuous culture or continuous fermentation is employed, Clostridium cultures may be initiated as with other types of fermentation. The culture medium containing the inoculated organism may then be fermented at a temperature from about 30° C. to about 40° C., preferably about 33° C. Sterile medium flows into the fermentor and fermentation products and cells flow out. Fermentation products and cells may be easily harvested from the outflow. Cells and/or other components may be returned to the culture. The flow rate may very with the size of the inoculum, the concentration of carbohydrates and nutrients in the media, the rate of growth of the particular strain, and the rate of solvent production. It is expected that flow rates would be adjusted according to these culture parameters. Exemplary flow rates may be from 0.001 per hour to 0.50 per hour, preferably 0.005 per hour to 0.25 per hour, and most preferably 0.01 per hour to 0.1 per hour.

[0056] Other forms of continuous culture or continuous fermentation include two stage continuous cultures or two stage batch cultures as disclosed in U.S. Pat. Nos. 4,520,104 and 4,605,620 incorporated herein by reference. Generally these methods employ a first reactor to maintain an inoculum and a second reactor for fermentation. By this means, an inoculum produced in the first reactor is fed continuously into the second reactor where butanol production takes place. The continuous inoculum-producing reactor is run at a dilution rate which prevents the buildup of solvents in the medium thereby maintaining a culture of vital cells which is continuously transferred to the fermentation reactor. The fermentation reactor is also operated in a continuous mode but at a much lower dilution rate than the first reactor in which the inoculum is produced. The proper dilution rate in the fermentation reactor depends on the concentration of carbohydrate in the medium and the rate at which the medium is removed or recycled. For an efficient fermentation, the dilution and recycle rates are adjusted so that the carbohydrate is essentially all consumed.

### C. Culture Analysis and Culture Products

[0057] Regardless of the method of fermentation, samples may be removed routinely for analysis of any parameter including cell content, carbohydrate content, pH, organic acid, or solvent production. Cells may be analyzed using any method including but not limited to microscopy, optical density (O.D.), chemical, biochemical, or genetic analyses. Carbohydrate analysis may be conducted through any method known in the art including chemical, physical or enzyme based assays. The presence and concentration of autoinducing peptides may also be determined. The determination of peptides may be performed by any method known in the art including but not limited to the use of high pressure liquid chromatography (HPLC) and immunochemical including antibody and/or enzyme based methods including but not limited to Enzyme-linked immunosorbent assay (ELISA). Solvent and organic acid production may be detected using any chemical method known in the art including gas chromatography, HPLC, near infra red (NIR), or colorimetric methods, by way of example those based on ceric ammonium nitrate as described in Reid and Truelove, (1952), Analyst, 77, 325, incorporated herein in its entirety by reference.

[0058] In addition to butanol other products of fermentation may be harvested at any stage in the culture, including but not limited to: ethanol; propanol; isopropanol; 1,2 propanediol; 1,3 propanediol; amyl alcohol; isoamyl alcohol; hexanol; riboflavin; formic acid; acetic acid; butyric acid; lactic acid; formic, acetic butyric, lactic, caprylic, and capric esters of the alcohols; acetoin; acetone; biomass; CO₂; and hydrogen by any method known in the art. (for review see: Industrial Microbiology, S. C. Prescott and C. G. Dunn, McGraw-Hill Book Company, Inc., New York, 1940). In addition to products of fermentation other useful product may be harvested including bacteriocins, antibiotics, as well as various enzymes and amino acids. Cells may also be removed and returned to culture. The solvents, particularly, butanol, may be recovered using standard techniques known in the art. Non-limiting methods of harvesting butanol may include passing the media over an absorbent material such as activated carbon as described in U.S. Pat. Nos. 4,520,104, 327,849, and 2,474,170, incorporated herein in their entirety by reference, or passing the media over silicalite, as described in U.S. Pat. No. 5,755,967, incorporated herein in its entirety by reference.

### D. Culture Media

[0059] Regardless of the fermentation process employed, the Clostridium organism is inoculated and cultured on a medium containing assimilable carbohydrates and nutrients. Assimilable carbohydrates used in the practice of this invention may be any carbohydrate that will sustain or allow fermentation by the particular strain of Clostridium. These include solubilized starches and sugar syrups as well as glucose or sucrose in pure or crude forms. Assimilable carbohydrates also include glucose, maltodextrin, and corn steep liquor and hydrolyzed cellulosic substrates. Also included is glycerol. The culture medium should also contain nutrients and any other growth factors needed for growth and reproduction of the particular microorganism employed. By way of example but not of limitation commonly used commercially available media include P2, MP2, T6, TYA, TYG, TYGM, DMM, 2xYTG, RCA (Reinforced Clostridial Agar), RCM (Reinforced Clostridial Medium), RSM (Reinforced Soluble Medium), NYG (nutrient broth, yeast extract, glucose), CGM, CBM (Clostridial Basal Medium), PDM, PG (potato, glucose), and Cooked-meat medium. Optionally, the culture medium may contain one or more organic acids. Exemplary organic acids include acetic and butyric which may be added to the medium in exemplary amounts from about 20 mM to about 80 mM. The culture medium is preferably sterilized in the fermentor, agitated and sparged with nitrogen gas for about 12 hours to about 16 hours.

### Definitions

[0060] The term “differentiated state” or “differentiated states” as used herein, refers to a Clostridium organism, or a culture of Clostridium organisms, that are expressing a specialized function. Non-limiting examples of differentiated states or specialized functions include exponential growth, solventogenesis, acidogenesis, granulose synthesis, extended serial propagation, and sporogenesis.

[0061] The terms “manipulate or modify” as used herein in reference to differentiated states, refer to altering the usual behavior of Clostridium in any way, including but not limited to, enhancing or diminishing, or, changing or maintaining a differentiated state.

[0062] The term “exponential growth” as used herein, refers to a Clostridium organism or culture where the number of organisms is increasing exponentially. This may be determined by any number of methods known in the art including optical density (O.D.) of the culture media, or cell number as determined through counting or alike.

[0063] The term “solventogenesis” as used herein refers to a Clostridium organism, or culture where the organisms are producing solvents, including but not limited to any one or more of the following: ethanol, butanol, propanol, isopropanol, 1,2 propanediol, or acetone. Determination of solventogenesis may be performed by any number of methods known in the art including gas chromatography, high pressure liquid chromatography, or any method known to detect alcohols.

[0064] The term “acidogenesis” as used herein refers to a Clostridium organism, or culture where the organisms are producing organic acids, including but not limited to any one or more of the following: acetic acid, butyric acid, or lactic acid. Determination of acidogenesis may be performed by any method known in the art to detect organic acids, including gas chromatography, or high pressure liquid chromatography.

[0065] The terms “extending serial propagation,” or “extended serial propagation” as used herein, refers to the increased capacity for sequential inoculations, or sequential transfers from a Clostridium culture since the culture was derived from spores. This may also be expressed as an increased number of serial batch cultures serially inoculated from a Clostridium culture. The terms extending serial propagation, or extended serial propagation also refers to the increased length of time that a continuous culture of Clostridium may be maintained in a specific differentiated state without the addition of new inoculum. The terms extending serial propagation or extended serial propagation may also refer to an increased number of generations or population doublings by Clostridium organisms since being derived from spores.

[0066] The term “granulose synthesis” as used herein refers to a Clostridium organism, or culture, when the organisms synthesize carbohydrate storage granules. Determination of granulose synthesis may be performed by any known method including chemically, histological or microscopically. The skilled artisan will recognize clostridial storage cells microscopically, which are typically elongated and larger then cells not in involved granulose synthesis.

[0067] The term “sporogenesis” as used herein refers to a Clostridium organism, or culture, when the organisms form spores. Determination of sporogenesis may be performed by any known method including microscopically, chemically or genetically. The skilled artisan may recognize spores microscopically by a typical refractive appearance.

[0068] In addition to the various methods described above it is known that the differentiated states of Clostridium are the result of genetic and biochemical pathways. Therefore, the detection of any of the above differentiated states is not limited to the methods described herein but may be detected genetically, biochemically, immunochemically or by any method known in art.

[0069] The term “peptide” as used herein is meant to be synonymous with oligopeptide, polypeptide, or protein. The term peptide is meant to designate an amino acid polymer of 2 or more amino acids and is not meant to impose a limitation on the length of the amino acid polymer.

[0070] The term “autoinducing peptide” as used herein is meant to refer to any peptide that may manipulate or modify a differentiated state. The term autoinducing peptide is not limited to naturally occurring peptides, but may also refer to a peptide derived from naturally occurring peptides such as by amino acid substitution or deletion.

[0071] A “conservative amino acid substitution” is one in which an amino acid residue is replaced with another residue having a chemically similar side chain. Families of amino acid residues having similar side chains have been defined in the art. These families include amino acids with basic side chains (e.g., lysine, arginine, histidine), acidic side chains (e.g., aspartic acid, glutamic acid), uncharged polar side chains (e.g., glycine, asparagine, glutamine, serine, threonine, tyrosine, cysteine), nonpolar side chains (e.g., alanine, valine, leucine, isoleucine, proline, phenylalanine, methionine, tryptophan), beta-branched side chains (e.g., threonine, valine, isoleucine) and aromatic side chains (e.g., tyrosine, phenylalanine, tryptophan, histidine).

[0072] As used herein, “percent Identity” of two amino acid sequences or of two nucleic acids is determined using the algorithm of Karlin and Altschul (Proc. Natl. Acad. Sci. USA, 87:2264-2268, 1990), modified as in Karlin and Altschul (Proc. Natl. Acad. Sci. USA, 90:5873-5877, 1993). Such an algorithm is incorporated into the NBLAST and XBLAST programs of Altschul et al. (J. Mol. Biol. 215:403-410, 1990). BLAST nucleotide searches are performed with the NBLAST program, score=100, wordlength=12, to obtain nucleotide sequences homologous to a nucleic acid molecule of the invention. BLAST protein searches are performed with the XBLAST program, score=50, wordlength=3, to obtain amino acid sequences homologous to a reference polypeptide. To obtain gapped alignments for comparison purposes, Gapped BLAST is utilized as described in Altschul et al. (Nucleic Acids Res. 25:3389-3402, 1997). When utilizing BLAST and Gapped BLAST programs, the default parameters of the respective programs (e.g. XBLAST and NBLAST) are used. See http://www.ncbi.nlm.nih.gov.

[0073] The term “dilution rate” as used herein, designates the value obtained by dividing the flow rate of the medium through the reactor in volume units per hour by the operating volume of the reactor measured in the same volume units. As stated, it has the implied dimensions of per hour.

[0074] Preferred embodiments of the invention are described in the following examples. Other embodiments within the scope of the claims herein will be apparent to one skilled in the art from consideration of the specification or practice of the invention as disclosed herein. It is intended that the specification, together with the examples, be considered exemplary only, with the scope and spirit of the invention being indicated by the claims, which follow the examples.

### EXAMPLES

### Methods and Materials

[0075] Bacterial strains and media. Clostridium acetobutylicum ATCC 824 and C. beijerinckii NCIMB 8052 are available from several commercial microbial culture collections including the American Type Culture Collection (ATCC), Manassas, Va., USA. The strains were grown at 30° C. or 37° C. in YE broth, which contained, per liter: 5.0 g yeast extract, 2.5 g casamino acids, 1.0 g L-asparagine, 0.5 g cysteine.HCl, 56 mg K₂HPO₄, 56 mg KH₂PO₄, 82 mg anhydrous MgSO₄, 8 mg FeSO₄.H₂O, 6 mg MnSO₄.H₂O and 10 g glucose. Alternatively, strains were grown in YEPG broth, which was identical to YE expect that K₂HPO₄ and KH₂PO₄ were increased to 145 mg/L each and glucose was increased to 60 g/L. The pH of the media was adjusted to 7.2 using 45% KOH prior to sterilization by autoclaving. Media were solidified by addition of 1.5% Bacteriological Agar, Actimedia Manufacturers, Inc., Lansing, Mich. All cultures were grown in anaerobic conditions using the AnaeroPack System, Mitsubishi Gas Chemical Co., Inc., Japan, and GasPak EZ Gas Generating Sachets, Becton, Dickinson and Co., Sparks, Md. Spore stocks were kept at room temperature on agar-solidified media and were activated by suspending spores in 0.5 mL to 1.0 mL of medium followed by heating for 10 min at 80° C. before inoculation into growth medium.

[0076] Synthesis of peptides. Once peptides meeting the selection criteria were indentified putative autoinducing peptide sequences were chemically synthesized by a commercially available facility (Biomatik, Corp., Markham, Ontario, Canada) and were provided at >95% purity. Peptides were resuspended in an appropriate solvent, based on the peptide sequence, to give a 1 mM final concentration and were stored in small aliquots at −80° C. The peptides were diluted for use in experiments and were stored at 4° C. for one week before being discarded.

[0077] Growth and pH measurements. Growth of bacterial cultures was measured spectrophotometrically using optical density at 600 nm and pH of cell-free culture supernatants was measured using a hand-held Shindengen ISFET pH Meter KS501, Shendengen Electric Manufacturing Co., Ltd., Bannockburn, Ill.

[0078] Analysis of solvents. Total alcohols in cell-free culture supernatants were measured using a modification of a colorimetric method based on ceric ammonium nitrate (Reid and Truelove, 1952). The ceric ion reagent was prepared by adding 1.3 mL of concentrated nitric acid to 40 mL of distilled water, then 10.96 g of ceric ammonium nitrate was dissolved in the dilute nitric acid solution and the solution was brought to a final volume of 50 mL. For the assay, 100 μL of butanol standard or culture supernatant was mixed with 900 μL distilled water in a disposable plastic cuvette followed by addition of 400 μL of the ceric ion reagent. The sample was mixed by inverting the cuvette six times then exactly two minutes later the optical density at 500 nm wavelength was measured. The concentration of total alcohols was determined by comparison with a standard curve prepared by using butanol diluted in distilled water.

### Example 1

[0079] Identification of TPR repeat-containing proteins. Amino acid sequences of the quorum sensing protein family RNPP (Rap/NprR/PlcR/PrgX) were recovered from the online National Center for Biotechnology Information (NCBI) Protein database (Table 1)

TABLE 1
Proteins of the RNPP family of quorum
sensing regulatory proteins.

| SEQ ID NO | Protein | Organism | Accession |
|---|---|---|---|
| SEQ ID NO: 1 | PlcR | Bacillus thuringiensis | ZP_00739149 |
| SEQ ID NO: 2 | RapE | Bacillus thuringiensis | AAM51168 |
| SEQ ID NO: 3 | RapA | Bacillus thuringiensis | AAM51160 |
| SEQ ID NO: 4 | RapC | Bacillus subtilis | AAT75294 |
| SEQ ID NO: 5 | NprR | Bacillus thuringiensis | ABK83928 |
| SEQ ID NO: 6 | PrgX | Enterococcus faecalis | AAA65845 |
| SEQ ID NO: 7 | Treg | Enterococcus faecalis | NP_815038 |
| SEQ ID NO: 8 | DNAbd | Bacillus anthracis | NP_843644 |
| SEQ ID NO: 9 | TraA | Enterococcus faecalis | BAA11197 |
| SEQ ID NO: 10 | Tact | Listeria moncytogenes | YP_013453 |
| SEQ ID NO: 11 | Tre | Lactobacillus casei | YP_805489 |
| SEQ ID NO: 12 | RggD | Streptococcus gorondii | AAG32546 |
| SEQ ID NO: 13 | MutR | Streptococcus mutans | AAD56141 |

[0080] The RNPP family protein sequences were used separately as query sequences in Position-Specific Iterated (PSI)-Basic Local Alignment Search Tool (BLAST) alignments with the published genome sequences of C. beijerinckii NCIMB 8052 (NCBI Reference Sequence NC_{—}009617) (SEQ ID NO:14) and C. acetobutylicum ATCC 824 (NCBI Reference Sequence NC_{—}003030) (SEQ ID NO:15), and the C. acetobutylicum ATCC 824 plasmid pSOL1 sequence (NCBI Reference Sequence NC_{—}001988) (SEQ ID NO:16) using the online NCBI Position Specific Iterated—Basic Local Alignment Search Tool (PSI-BLAST) search engine. PSI-BLAST refers to a feature of BLAST 2.0 in which a profile, or position specific scoring matrix (PSSM), was constructed (automatically) from a multiple alignment of the highest scoring hits in an initial BLAST search. The PSSM was generated by calculating position-specific scores for each position in the alignment. Highly conserved positions receive high scores and weakly conserved positions receive scores near zero. The profile was used to perform subsequent searches. The BLAST search and the results of each “iteration” were used to refine the profile. This iterative searching strategy results in increased sensitivity (see Altschul, et al., (1997), Nucleic Acids Research; Vol. 25, No. 17, 3389-3402). A maximum of five Psi-Blast iterations were performed with each query sequence and alignments below the threshold value of 0.005 were considered to be matches.

[0081] Identification of putative secreted proteins associated with TPR repeat-containing proteins. Proteins identified in the genome sequences of C. beijerinckii NCIMB 8052 (NCBI Reference Sequence NC_{—}009617) (SEQ ID NO:14), C. acetobutylicum ATCC 824 (NCBI Reference Sequence NC_{—}003030) (SEQ ID NO:15) and C. acetobutylicum ATCC 824 plasmid pSOL1 (NCBI Reference Sequence NC_{—}001988) (SEQ ID NO:16), which aligned with members of the RNPP family, were examined using the NCBI Nucleotide Database Graphics format. Sequences of proteins in the same orientation which were immediately downstream from the identified protein sequences were recovered and analyzed for the presence of a typical Gram-positive secretion signal peptide. This process may be aided by the use of a Signal P 3.0 viewer which predicts the presence and location of secretion signal peptide cleavage sites in amino acid sequences. This method incorporates a prediction of cleavage sites and a signal peptide/non-signal peptide prediction based on a combination of several artificial neural networks and hidden models (see Bendtsen et al., (2004) J. of Mol. Biology, Vol. 340: 783-795). Proteins with secretion signal sequences were then examined for internal putative autoinducing peptides. Example 2

[0082] TPR repeat-containing proteins in C. acetobutylicum ATCC 824, C. beijerinckii NCIMB 8052 and C. acetobutylicum ATCC 824 plasmid pSOL1. A total of 46 individual protein sequences were identified in the C. acetobutylicum ATCC 824 genome and plasmid pSOL1 sequence by Psi-Blast alignments using RNPP family protein sequences as the queries (Table 2). PlcR and DNAbd aligned with nearly the same set of C. acetobutylicum proteins while RapC aligned with 9 members of that group and also with 20 additional proteins. NprR and Treg each aligned with a protein in the PlcR/DNAbd group, and Tact aligned with a protein that did not align with any of the other RNPP family members. The remaining 6 RNPP family proteins that were used as query sequences in Psi-Blast alignments did not align with any of the C. acetobutylicum proteins.

TABLE 2
RNPP family protein alignments with the C. acetobutylicum ATCC
824 genome (SEQ ID NO: 15) and plasmid pSOL1 (SEQ ID NO: 16).

| | NCIB | | Query Sequence | | | | | |
|---|---|---|---|---|---|---|---|---|
| SEQ ID NO | Reference | Locus Tag | PlcR | DNAbd | RapC | NprR | Treg | Tact |
| SEQ ID NO: 17 | NP_149204 | CA_P0040 | X | X | X | | | |
| SEQ ID NO: 18 | NP_347846 | CAC1214 | X | X | X | | | |
| SEQ ID NO: 19 | NP_346828 | CAC0186 | X | X | X | | | |
| SEQ ID NO: 20 | NP_149312 | CA_P0149 | X | X | X | | | |
| SEQ ID NO: 21 | NP_347679 | CAC1043 | X | X | X | | | |
| SEQ ID NO: 22 | NP_349104 | CAC2490 | X | X | X | | | |
| SEQ ID NO: 23 | NP_346965 | CAC0324 | X | X | X | | | |
| SEQ ID NO: 24 | NP_347593 | CAC0957 | X | X | X | | | |
| SEQ ID NO: 25 | NP_347594 | CAC0958 | X | X | | X | | |
| SEQ ID NO: 26 | NP_350275 | CAC3694 | X | X | X | | | |
| SEQ ID NO: 27 | NP_347477 | CAC0841 | X | X | | | | |
| SEQ ID NO: 28 | NP_350276 | CAC3695 | X | X | | | | |
| SEQ ID NO: 29 | NP_348569 | CAC1947 | X | X | | | X | |
| SEQ ID NO: 30 | NP_349841 | CAC3247 | X | X | | | | |
| SEQ ID NO: 31 | NP_350060 | CAC3472 | X | X | | | | |
| SEQ ID NO: 32 | NP_350228 | CAC3646 | X | X | | | | |
| SEQ ID NO: 33 | NP_348205 | CAC1578 | X | X | | | | |
| SEQ ID NO: 34 | NP_348467 | CAC1843 | X | X | | | | |
| SEQ ID NO: 35 | NP_349087 | CAC2473 | X | X | | | | |
| SEQ ID NO: 36 | NP_349109 | CAC2495 | X | X | | | | |
| SEQ ID NO: 37 | NP_349916 | CAC3324 | X | X | | | | |
| SEQ ID NO: 38 | NP_347105 | CAC0465 | X | | | | | |
| SEQ ID NO: 39 | NP_348186 | CAC1559 | X | X | | | | |
| SEQ ID NO: 40 | NP_348491 | CAC1867 | X | | | | | |
| SEQ ID NO: 41 | NP_348091 | CAC1463 | X | X | | | | |
| SEQ ID NO: 42 | NP_347698 | CAC1063 | | | X | | | |
| SEQ ID NO: 43 | NP_347702 | CAC1067 | | | X | | | |
| SEQ ID NO: 44 | NP_347699 | CAC1064 | | | X | | | |
| SEQ ID NO: 45 | NP_349230 | CAC2623 | | | X | | | |
| SEQ ID NO: 46 | NP_347052 | CAC0412 | | | X | | | |
| SEQ ID NO: 47 | NP_349426 | CAC2822 | | | X | | | |
| SEQ ID NO: 48 | NP_349599 | CAC2998 | | | X | | | |
| SEQ ID NO: 49 | NP_349900 | CAC3308 | | | X | | | |
| SEQ ID NO: 50 | NP_347561 | CAC0925 | | | X | | | |
| SEQ ID NO: 51 | NP_347056 | CAC0416 | | | X | | | |
| SEQ ID NO: 52 | NP_346692 | CAC0045 | | | X | | | |
| SEQ ID NO: 53 | NP_350039 | CAC3449 | | | X | | | |
| SEQ ID NO: 54 | NP_149324 | CA_P0161 | | | X | | | |
| SEQ ID NO: 55 | NP_348571 | CAC1949 | | X | X | | | |
| SEQ ID NO: 56 | NP_347055 | CAC0415 | | | X | | | |
| SEQ ID NO: 57 | NP_349405 | CAC2801 | | | X | | | |
| SEQ ID NO: 58 | NP_348952 | CAC2336 | | | X | | | |
| SEQ ID NO: 59 | NP_347044 | CAC0404 | | | X | | | |
| SEQ ID NO: 60 | NP_349017 | CAC2402 | | | X | | | |
| SEQ ID NO: 61 | NP_348298 | CAC1672 | | | X | | | |
| SEQ ID NO: 62 | NP_347555 | CAC0919 | | | | | | X |

### Example 3

[0083] A total of 28 individual protein sequences were identified in the C. beijerinckii NCIMB 8052 genome sequence by Psi-Blast alignments using RNPP family protein sequences as the queries (Table 3). PlcR, NprR and Treg aligned with nearly the same set of C. beijerinckii proteins, DNAbd aligned with a single protein in the PlcR/NprR/Treg group, and RapC aligned with a protein that did not align with any of the other RNPP family members. The remaining 7 RNPP family proteins that were used as query sequences in Psi-Blast alignments did not align with any of the C. beijerinckii proteins.

TABLE 3
RNPP family protein alignments with C. beijerinckii
NCIMB 8052 (SEQ ID NO: 14).

| | | | Query Sequence | | | | |
|---|---|---|---|---|---|---|---|
| SEQ ID NO | NCIB Reference | Locus Tag | PlcR | DNAbd | RapC | NprR | Treg |
| SEQ ID NO: 63 | YP_001307785 | Cbei_0642 | X | | | X | X |
| SEQ ID NO: 64 | YP_001310899 | Cbei_3827 | X | | | X | X |
| SEQ ID NO: 65 | YP_001310822 | Cbei_3749 | X | | | X | X |
| SEQ ID NO: 66 | YP_001308625 | Cbei_1492 | X | | | X | X |
| SEQ ID NO: 67 | YP_001309830 | Cbei_2723 | X | X | | X | X |
| SEQ ID NO: 68 | YP_001311025 | Cbei_3959 | X | | | X | X |
| SEQ ID NO: 69 | YP_001309285 | Cbei_2162 | X | | | X | X |
| SEQ ID NO: 70 | YP_001309337 | Cbei_2215 | X | | | X | X |
| SEQ ID NO: 71 | YP_001310692 | Cbei_3616 | X | | | X | X |
| SEQ ID NO: 72 | YP_001308745 | Cbei_1615 | X | | | X | X |
| SEQ ID NO: 73 | YP_001308026 | Cbei_0886 | X | | | X | X |
| SEQ ID NO: 74 | YP_001307786 | Cbei_0643 | X | | | X | X |
| SEQ ID NO: 75 | YP_001309382 | Cbei_2265 | X | | | X | X |
| SEQ ID NO: 76 | YP_001308393 | Cbei_1256 | X | | | X | X |
| SEQ ID NO: 77 | YP_001308072 | Cbei_0932 | X | | | X | X |
| SEQ ID NO: 78 | YP_001311244 | Cbei_4178 | X | | | X | X |
| SEQ ID NO: 79 | YP_001308109 | Cbei_0969 | X | | | X | X |
| SEQ ID NO: 80 | YP_001310559 | Cbei_3479 | X | | | X | X |
| SEQ ID NO: 81 | YP_001310563 | Cbei_3483 | X | | | X | X |
| SEQ ID NO: 82 | YP_001310537 | Cbei_3456 | X | | | X | X |
| SEQ ID NO: 83 | YP_001312058 | Cbei_4996 | X | | | X | X |
| SEQ ID NO: 84 | YP_001307844 | Cbei_0704 | X | | | X | X |
| SEQ ID NO: 85 | YP_001310808 | Cbei_3735 | X | | | | X |
| SEQ ID NO: 86 | YP_001312059 | Cbei_4997 | X | | | X | X |
| SEQ ID NO: 87 | YP_001310627 | Cbei_3549 | X | | | X | X |
| SEQ ID NO: 88 | YP_001307857 | Cbei_0717 | X | | | | |
| SEQ ID NO: 89 | YP_001308204 | Cbei_1064 | | | X | | |
| SEQ ID NO: 90 | YP_001307181 | Cbei_0035 | | | | X | X |

[0084] The total number of matches found in the genome sequences of C. acetobutylicum ATCC 824 and C. beijerinckii NCIMB 8052 with each query protein sequence is summarized in Table 4.

TABLE 4
Total number of matches found with each query protein sequence.

| | | | C. acetobutylicum |
|---|---|---|---|
| | Query | C. beijerinckii | SEQ ID NO: 15 and |
| SEQ ID NO | Sequence | SEQ ID NO: 14 | SEQ ID NO: 16 |
| SEQ ID NO: 1 | PlcR | 26 | 25 |
| SEQ ID NO: 2 | RapE | 0 | 0 |
| SEQ ID NO: 3 | RapA | 0 | 0 |
| SEQ ID NO: 4 | RapC | 1 | 29 |
| SEQ ID NO: 5 | NprR | 25 | 1 |
| SEQ ID NO: 6 | PrgX | 0 | 0 |
| SEQ ID NO: 7 | Treg | 26 | 1 |
| SEQ ID NO: 8 | DNAbd | 1 | 24 |
| SEQ ID NO: 9 | TraA | 0 | 0 |
| SEQ ID NO: 10 | Tact | 0 | 1 |
| SEQ ID NO: 11 | Tre | 0 | 0 |
| SEQ ID NO: 12 | Rggd | 0 | 0 |
| SEQ ID NO: 13 | MutR | 0 | 0 |

### Example 4

[0085] Putative secreted proteins associated with TPR repeat-containing proteins in C. acetobutylicum ATCC 824 and C. beijerinckii NCIMB 8052. The genomic regions and context of the sequence loci that were identified by Psi-Blast alignments with RNPP family protein sequences were examined with the aid of a graphic utility. Examples of such viewers include the Entrez Gene Sequence Viewer or MapViewer. In particular, genes immediately downstream from and transcribed in the same direction as the identified loci were identified. Thirty-three of the 45 loci identified in C. acetobutylicum and 19 of the 28 loci identified in C. beijerinckii had nearby downstream genes transcribed in the same direction (Tables 5 and 6).

TABLE 5
Genes immediately downstream from C. acetobutylicum ATCC
824 Psi-Blast alignments with RNPP family protein sequences.

| | | |
|---|---|---|
| SEQ ID NO | Locus Tag | Gene ID |

Aligned

| | | |
|---|---|---|
| SEQ ID NO: 17 | CA_P0040 | 1116045 |
| SEQ ID NO: 18 | CAC1214 | 1117397 |
| SEQ ID NO: 21 | CAC1043 | 1117226 |
| SEQ ID NO: 22 | CAC2490 | 1118673 |
| SEQ ID NO: 24 | CAC0957 | 1117140 |
| SEQ ID NO: 25 | CAC0958 | 1117141 |
| SEQ ID NO: 26 | CAC3694 | 1119876 |
| SEQ ID NO: 27 | CAC0841 | 1117024 |
| SEQ ID NO: 28 | CAC3695 | 1119877 |
| SEQ ID NO: 29 | CAC1947 | 1118130 |
| SEQ ID NO: 30 | CAC3247 | 1119429 |
| SEQ ID NO: 31 | CAC3472 | 1119654 |
| SEQ ID NO: 35 | CAC2473 | 1118656 |
| SEQ ID NO: 36 | CAC2495 | 1118678 |
| SEQ ID NO: 37 | CAC3324 | 1119506 |
| SEQ ID NO: 41 | CAC1463 | 1117646 |
| SEQ ID NO: 42 | CAC1063 | 1117246 |
| SEQ ID NO: 43 | CAC1067 | 1117250 |
| SEQ ID NO: 44 | CAC1064 | 1117247 |
| SEQ ID NO: 45 | CAC2623 | 1118806 |
| SEQ ID NO: 46 | CAC0412 | 1116595 |
| SEQ ID NO: 47 | CAC2822 | 1119005 |
| SEQ ID NO: 49 | CAC3308 | 1119490 |
| SEQ ID NO: 50 | CAC0925 | 1117108 |
| SEQ ID NO: 51 | CAC0416 | 1116599 |
| SEQ ID NO: 52 | CAC0045 | 1116228 |
| SEQ ID NO: 53 | CAC3449 | 1119631 |
| SEQ ID NO: 54 | CA_P0161 | 1116166 |
| SEQ ID NO: 56 | CAC0415 | 1116598 |
| SEQ ID NO: 57 | CAC2801 | 1118984 |
| SEQ ID NO: 58 | CAC2336 | 1118519 |
| SEQ ID NO: 59 | CAC0404 | 1116587 |
| SEQ ID NO: 61 | CAC1672 | 1117855 |

Downstream

| | | |
|---|---|---|
| SEQ ID NO: 91 | CA_P0039 | 1116044 |
| SEQ ID NO: 92 | CAC1215 | 1117398 |
| SEQ ID NO: 93 | CAC1044 | 1117227 |
| SEQ ID NO: 94 | CAC2488 | 1118671 |
| SEQ ID NO: 95 | CAC0958 | 1117141 |
| SEQ ID NO: 96 | CAC0959 | 1117142 |
| SEQ ID NO: 97 | CAC3693 | 1119875 |
| SEQ ID NO: 98 | CAC0840 | 1117023 |
| SEQ ID NO: 99 | CAC3694 | 1119876 |
| SEQ ID NO: 100 | CAC1948 | 1118131 |
| SEQ ID NO: 101 | CAC3246 | 1119428 |
| SEQ ID NO: 102 | CAC3470 | 1119652 |
| SEQ ID NO: 103 | CAC2474 | 1118657 |
| SEQ ID NO: 104 | CAC2494 | 1118677 |
| SEQ ID NO: 105 | CAC3323 | 1119505 |
| SEQ ID NO: 106 | CAC1464 | 1117647 |
| SEQ ID NO: 107 | CAC1064 | 1117247 |
| SEQ ID NO: 108 | CAC1068 | 1117251 |
| SEQ ID NO: 109 | CAC1065 | 1117248 |
| SEQ ID NO: 110 | CAC2622 | 1118805 |
| SEQ ID NO: 111 | CAC0413 | 1116596 |
| SEQ ID NO: 112 | CAC2821 | 1119004 |
| SEQ ID NO: 113 | CAC3307 | 1119489 |
| SEQ ID NO: 114 | CAC0926 | 1117109 |
| SEQ ID NO: 115 | CAC0417 | 1116600 |
| SEQ ID NO: 116 | CAC0046 | 1116229 |
| SEQ ID NO: 117 | CAC3450 | 1119632 |
| SEQ ID NO: 118 | CA_P0162 | 1116167 |
| SEQ ID NO: 119 | CAC0416 | 1116599 |
| SEQ ID NO: 120 | CAC2800 | 1118983 |
| SEQ ID NO: 121 | CAC2335 | 1118518 |
| SEQ ID NO: 122 | CAC0405 | 1116588 |
| SEQ ID NO: 123 | CAC1673 | 1117856 |

TABLE 6
Genes immediately downstream from C. beijerinckii NCIMB 8052
Psi-Blast alignments with RNPP family protein sequences.

| | | |
|---|---|---|
| SEQ ID NO | Locus Tag | Gene ID |

Aligned

| | | |
|---|---|---|
| SEQ ID NO: 63 | Cbei_0642 | 5291873 |
| SEQ ID NO: 64 | Cbei_3827 | 5294989 |
| SEQ ID NO: 65 | Cbei_3749 | 5294912 |
| SEQ ID NO: 66 | Cbei_1492 | 5292713 |
| SEQ ID NO: 67 | Cbei_2723 | 5293919 |
| SEQ ID NO: 68 | Cbei_3959 | 5295115 |
| SEQ ID NO: 71 | Cbei_3616 | 5294782 |
| SEQ ID NO: 73 | Cbei_0886 | 5292114 |
| SEQ ID NO: 74 | Cbei_0643 | 5291874 |
| SEQ ID NO: 76 | Cbei_1256 | 5292481 |
| SEQ ID NO: 80 | Cbei_3479 | 5294649 |
| SEQ ID NO: 81 | Cbei_3483 | 5294653 |
| SEQ ID NO: 82 | Cbei_3456 | 5294627 |
| SEQ ID NO: 85 | Cbei_3735 | 5294898 |
| SEQ ID NO: 86 | Cbei_4997 | 5296149 |
| SEQ ID NO: 87 | Cbei_3549 | 5294717 |
| SEQ ID NO: 88 | Cbei_0717 | 5291945 |
| SEQ ID NO: 89 | Cbei_1064 | 5292292 |
| SEQ ID NO: 90 | Cbei_0035 | 5291269 |

Downstream

| | | |
|---|---|---|
| SEQ ID NO: 124 | Cbei_0643 | 5291874 |
| SEQ ID NO: 125 | Cbei_3826 | 5294988 |
| SEQ ID NO: 126 | Cbei_3748 | 5294911 |
| SEQ ID NO: 127 | Cbei_1491 | 5292712 |
| SEQ ID NO: 128 | Cbei_2722 | 5293918 |
| SEQ ID NO: 129 | Cbei_3960 | 5295116 |
| SEQ ID NO: 130 | Cbei_3615 | 5294781 |
| SEQ ID NO: 131 | Cbei_0885 | 5292113 |
| SEQ ID NO: 132 | Cbei_0644 | 5291875 |
| SEQ ID NO: 133 | Cbei_1257 | 5292482 |
| SEQ ID NO: 134 | Cbei_3478 | 5294648 |
| SEQ ID NO: 135 | Cbei_3482 | 5294652 |
| SEQ ID NO: 136 | Cbei_3455 | 5294626 |
| SEQ ID NO: 137 | Cbei_3734 | 5294897 |
| SEQ ID NO: 138 | Cbei_4998 | 5296150 |
| SEQ ID NO: 139 | Cbei_3550 | 5294718 |
| SEQ ID NO: 140 | Cbei_0718 | 5291946 |
| SEQ ID NO: 141 | Cbei_1065 | 5292293 |
| SEQ ID NO: 142 | Cbei_0036 | 5291270 |

[0086] Each of the protein sequences for the downstream proteins listed in Tables 5 and 6, above, was analyzed for the presence of a typical Gram-positive protein secretion signal peptide using the Signal P 3.0 server (see Bendtsen et al., (2004) J. of Mol. Biology, 340: 783-795). Four of the 33 downstream proteins in C. acetobutylicum ATCC 824 had putative secretion signals, while only 1 of the downstream proteins in C. beijerinckii NCIMB 8052 contained a secretion signal (Table 7).

TABLE 7
Proteins immediately downstream from RNPP-aligned proteins
in C. acetobutylicum ATCC 824 and C. beijerinckii NCIMB
8052 that contain putative secretion signals.

| | | Probability | | Length | |
|---|---|---|---|---|---|
| | | Signal | Cleavage | Signal | Released |
| SEQ ID NO | Locus Tag | Peptide | Site | Sequence | Protein |
| SEQ ID NO: 97 | CAC3693 | 0.995 | 0.997 | 34 aa | 7 aa |
| SEQ ID NO: 110 | CAC2622 | 0.997 | 0.577 | 32 aa | 275 aa |
| SEQ ID NO: 112 | CAC2821 | 0.727 | 0.385 | 29 aa | 649 aa |
| SEQ ID NO: 121 | CAC2335 | 0.639 | 0.638 | 23 aa | 280 aa |
| SEQ ID NO: 141 | Cbei_1065 | 0.999 | 0.999 | 25 aa | 152 aa |

### Example 5

[0087] Identification of autoinducing peptides in putative secreted proteins. C. acetobutylicum ATCC 824 locus CAC3693 (SEQ ID NO: 97) has been described as a hypothetical protein in the genome sequence of that organism. The 5′ end of the proposed coding sequence for CAC3693 overlaps 8 nucleotides of the 3′ end of the upstream TPR repeat-containing protein CAC3694 (SEQ ID NO: 26), which was identified by alignment of PlcR, RapC and DNAbd with the C. acetobutylicum genome using Psi-Blast. CAC3693 is likely exported from the cell by means of the putative secretion signal, and cleavage of the signal sequence would then release a heptapeptide with the amino acid sequence SYPGWSW (SEQ ID NO:143). The genetic organization of the TPR repeat-containing CAC3694 and the overlapping downstream, secreted CAC3693 is reminiscent of that of the Rap protein and associated Phr peptide genes in Bacillus subtilis, which encode phosphatases and phosphatase inhibitors, respectively (Perego, Peptides 22:1541-1547, 2001). While the B. subtilis Phr peptides can be aligned on a RxxT amino acid sequence motif or on an internal lysine residue, the sequence identified in C. acetobutylicum is quite different and contains 2 tryptophan residues.

[0088] C. acetobutylicum ATCC 824 locus CAC2622 (SEQ ID NO: 110) has been described as a ComE-like protein. The 5′ end of the coding sequence for the protein is located about 250 nucleotides downstream from the end of CAC2623 (SEQ ID NO: 45), which has been described as a quorum sensing regulatory protein and was identified in this study by alignment with RapC. As a ComE-like protein, CAC2622 might be involved with DNA binding or uptake at the cell surface. CAC2622 is likely exported from the cell and the secretion signal peptide is cleaved as a 32, 30, or 23 amino acid leader. A cysteine residue located at position 24 of the protein, immediately distal to a possible leader peptide cleavage site, is somewhat reminiscent of the structure of Enterococcal autoinducing precursors (Clewell, Mol Microbiol 35:246-247, 2000). CAC2622 is likely exported from the cell by means of the putative secretion signal, and further processing of the signal sequence would then release a heptapeptide with the amino acid sequence ILILISG (SEQ ID NO:144).

[0089] A BLAST search of the C. acetobutylicum ATCC 824 plasmid pSOL1 sequence (SEQ ID NO:16) using the heptapeptide ILILISG (SEQ ID NO:144) as the query found a similar protein sequence located in the putative protein CA_P0131 (SEQ ID NO:146), which is described as a relative of the multidrug resistance protein family. Also, Signal P 3.0 identified an N-terminal putative protein secretion signal making it likely that CA_P0131 is exported from the cell. Further processing of the protein would then release a peptide with an amino acid sequence similar to SEQ ID NO:144,

[0090] C. beijerinckii NCIMB 8052 locus Cbei_{—}1065 (SEQ ID NO: 141) has been described as a hypothetical protein in the genome sequence of that organism. The 5′ end of the coding sequence for the protein is located about 640 nucleotides downstream from the end of Cbei_{—}1064 (SEQ ID NO: 89), which is described as a TPR repeat-containing protein and was identified by alignment with RapC. The N-terminal sequence of Cbei_{—}1065 contains a typical Gram-positive signal sequence that would result in export and release of a 152 amino acid protein. The remaining 25 amino acid secretion signal contains a Phr peptide RxxT motif, and further processing of the leader peptide could release the pentapeptide IRLIT (SEQ ID NO:145).

[0091] A BLAST search of the C. beijerinckii NCIMB genome sequence (SEQ ID NO:14) using the pentapeptide IRLIT (SEQ ID NO:145) as the query found an identical protein sequence located in the putative protein Cbei_{—}2139 (SEQ ID NO:147). Cbei_{—}2139 has been described as a transport system permease protein. Signal P 3.0 identified an N-terminal putative protein secretion signal making it likely that Cbei2139 is exported from the cell by means of the putative secretion signal. Further processing of the protein would then release a peptide that contains an amino acid sequence similar to SEQ ID NO:145. Peptides and putative proteins from C. acetobutylicum ATCC 824 and C. beijerinckii NCIMB 8052 that might function as or contain autoinducing peptides are summarized in Table 8.

[0092] C. beijerinckii NCIMB locus Cbei_{—}1066 (SEQ ID NO:148) has also been described as a hypothetical protein in the genome sequence of that organism. The 5′ end of the coding sequence for the protein is located about 905 nucleotides downstream from the end of Cbei_{—}1065 (SEQ ID NO:145). The N-terminal sequence of Cbei_{—}1066 appears to contain a typical Gram-positive signal sequence that would result in export and release of a 176 amino acid protein and a 27 amino acid secretion signal. Further processing of either the released protein or secretion signal may result in release of a peptide that functions as a quorum sensor.

TABLE 8
Autoinducing Peptides from C. acetobutylicum ATCC 824 and
C. beijerinckii NCIMB 8052.

| | | Autoinducing Peptide | |
|---|---|---|---|
| | | SEQ ID | |
| Organism | Locus | NO | Sequence |
| C. | CAC3693 | SEQ ID | SYPGWSW |
| acetobutylicum | | NO: 143 | |
| C. | CAC2622 | SEQ ID | ILILISG |
| acetobutylicum | | NO: 144 | |
| C. beijerinckii | Cbei_1065 | SEQ ID | IRLIT |
| | | NO: 145 | |
| C. | CA_P0131 | SEQ ID | MTQMNSRKKSIIASLMVAMFLGAIEGTVVTTA |
| acetobutylicum | | NO: 146 | MPTIVRDLNGFDKISLVFSVYLLTSAISTPIYG |
| | | | KIADLYGRKRALSTGIIIFLLGSALCGISSNMY |
| | | | ELILFRALQGIGAGSIFTVSYTIVGDVFSLEER |
| | | | GKVQGWISSVWGIASLLGPFIGGFFIDYMSW |
| | | | NWIFYINLPFGIFSLVLLEKNLKEKVEKKKTPM |
| | | | DYLGIVTLTLTIVIFLLTILGINENTKISSAKIILP |
| | | | MLVTVLLLFVFYFIEKRAKEPLIPFDIFSKQSNI |
| | | | VNIISFLVSGILIGTDVYLPIYIQNVLGYSATISG |
| | | | LSLASMSISWILSSFVLSKAIQKYGERPVVFIS |
| | | | TLITLVSTVLFYTLTGNSPLILVIIYGFIIGFGYG |
| | | | GTLTTLTIVIQEAVSKDKRGAATGANSLLRTM |
| | | | GQTIGVAIFGVIFNLNIAKYLYKLGIRGINVNSL |
| | | | YGSGNVHTGIPLDKVKASLNFGVHTLFFILILI |
| | | | SVICTIMSVMLSNSLNKKKNMR |
| C. beijerinckii | Cbei_2139 | SEQ ID | MKRNNKNAITFTVCSIFILIVGLILGVSLGATQI |
| | | NO: 147 | GISEIWHSIFNYSERLELVLIRDVRIPRVLCVL |
| | | | FTGGILGVTGAMIQGVTRNPIAEPSLLGVSQ |
| | | | GATLVIAIFYAMGISINTTNVMIAALIGSIFSGII |
| | | | VIGFISKKANNSSITKILLAGTAMSTFFISLTTIV |
| | | | GLLSNQSQLLAFWVAGGFRNATWLDFKLVS |
| | | | VIATIGLIIALLLSKKINILSLGDDVAISLGQNPE |
| | | | KIRLITLLVMIPMCAGAVAVGKNIGFVGLIVPQI |
| | | | VRKILGEDYRINIPCSFLLGAVLLTYADIAARM |
| | | | FLNPYETPIGIFTALIGVPFFIAVARKEKG |
| C. beijerinckii | Cbei_1066 | SEQ ID | MTRKLIIATVLMLSTVMVSCSTKPSDSPKPSD |
| | | NO: 148 | NNTTTVEQNKDDNGSSNADSKKANETTSDT |
| | | | KKVNKVKLSIYSIDDNSLEPNESGTIEVNENS |
| | | | ALQDKLKELAKAVSEKKFDNLPIEVKSIDTVN |
| | | | GKKVATINLTDSNNKKWVPKFQGSTGGSVT |
| | | | ANTLIENFLQSNNKSKGEWIDGVKFLYNNETI |
| | | | EYEHASDLSTVKYAN |

### Example 6

[0093] Effect of peptide SEQ ID NO:143 addition on sequential batch cultures of C. acetobutylicum ATCC 824 grown at 30° C. Spores of C. acetobutylicum ATCC 824 were germinated and grown overnight at 30° C. under anaerobic conditions in YEPG medium. After about 24 h of growth, 75 μL of the culture was transferred (transfer 1) to each of four flasks that contained 10 mL of YEPG and either had no treatment or were treated with peptide SEQ ID NO:143 (see Table 8 and FIG. 1) at 1 nM, 10 nM or 50 nM. Thereafter, 75 μL of each culture was transferred, at the same time, every 24-48 h to 10 mL of fresh YEPG that contained the same peptide treatment or no treatment. Each culture was stopped after 96 hours of incubation and optical density, pH and ceric ion reactive chemicals were measured. Sequential batch culturing was continued through 5 transfers at which point the untreated culture and those treated with 1 nM and 10 nM of peptide SEQ ID NO:143 had stopped growing (Table 9). The untreated culture did not grow after the second transfer, but growth was prolonged past the second transfer for all cultures treated with peptide SEQ ID NO:143. The peptide treatments showed a dose response for extending growth during sequential batch cultures in that adding peptide SEQ ID NO:143 to 1 nM allowed growth through the third transfer, 10 nM allowed growth through the fourth transfer and 50 nM extended growth through the fifth transfer. In addition, treatment with 1 nM of peptide SEQ ID NO:143 appeared to stop growth at the first transfer, but growth was restored in the second and third transfers.

TABLE 9
Optical density at 600 nm of C. acetobutylicum ATCC
824 96 h culture broths following sequential transfers
in the absence and presence of peptide SEQ ID NO: 143.

Peptide SEQ ID NO: 143 Concentration

| Transfer | 0 | 1 nM | 10 nM | 50 nM |
|---|---|---|---|---|
| 1 | 1.908 | 0.005 | 2.001 | 1.879 |
| 2 | 0.043 | 2.274 | 2.245 | 2.089 |
| 3 | 0.042 | 2.165 | 2.379 | 2.313 |
| 4 | 0.007 | 0.044 | 2.266 | 2.187 |
| 5 | 0.004 | 0.004 | 0.028 | 2.173 |

[0094] Final pH of the sequential cultures mirrored the growth results (Table 10 and FIG. 2). Cultures that grew had final pH values, after 96 h, of 4.6 or less while cultures that did not grow had final pH readings of 5.9 and higher For the untreated culture, final pH rose to 6.1 at the second transfer while the final pH of cultures treated with 1 nM and 10 nM of peptide SEQ ID NO:143 rose to 6.0 and 5.9 after the fourth and fifth transfers, respectively. The pH of the culture treated with 50 nM of peptide SEQ ID NO:143 remained low at the fifth transfer. Also reflecting the optical density data, the final pH of the culture treated with 1 nM of peptide SEQ ID NO:143 was 6.0 at the first transfer but then dropped to 4.4 at the second and third transfers.

TABLE 10
Final pH of C. acetobutylicum ATCC 824 96 h culture
broths following sequential transfers in the absence
and presence of peptide SEQ ID NO: 143.

Peptide SEQ ID NO: 143 Concentration

| Transfer | 0 | 1 nM | 10 nM | 50 nM |
|---|---|---|---|---|
| 1 | 4.5 | 6.0 | 4.4 | 4.4 |
| 2 | 6.1 | 4.4 | 4.4 | 4.6 |
| 3 | 6.0 | 4.4 | 4.5 | 4.5 |
| 4 | 6.1 | 6.0 | 4.5 | 4.4 |
| 5 | 6.0 | 6.0 | 6.0 | 4.3 |

[0095] The presence of ceric ion reactive chemicals, which reflects total alcohols concentration in the fermentation broths, was also affected by the addition of peptide SEQ ID NO:143 in sequential batch cultures (Table 11 and FIG. 3). While ceric ion reactive compounds decreased in the untreated culture and the cultures treated with 1 nM and 10 nM peptide SEQ ID NO:143 they did not decrease through five sequential transfers of the culture treated with 50 nM. Similar to the dose response seen in the growth data (see Table 9 and FIG. 1), ceric ion reactive compounds decreased dramatically at the second transfer of the untreated culture and at the fourth and fifth transfers of the cultures treated with 1 nM and 10 nM of peptide SEQ ID NO:143, respectively. Also reflecting the optical density data, the presence of ceric ion reactive compounds was low in the culture treated with 1 nM of peptide SEQ ID NO:143 at the first transfer but then increased at the second and third transfers.

TABLE 11
Optical density of ceric ion reactive compounds measured
at 500 nm in C. acetobutylicum ATCC 824 96 h culture
broths following sequential transfers in the absence
and presence of peptide SEQ ID NO: 143.

Peptide SEQ ID NO: 143 Concentration

| Transfer | 0 | 1 nM | 10 nM | 50 nM |
|---|---|---|---|---|
| 1 | 0.186 | 0.048 | 0.175 | 0.159 |
| 2 | 0.066 | 0.119 | 0.184 | 0.189 |
| 3 | 0.039 | 0.167 | 0.187 | 0.183 |
| 4 | 0.040 | 0.031 | 0.192 | 0.187 |
| 5 | 0.052 | 0.040 | 0.043 | 0.174 |

[0096] In summary, addition of peptide SEQ ID NO:143 to broth cultures of C. acetobutylicum ATCC 824 allowed the cultures to be sequentially transferred at least four more times than a culture that did not receive added peptide. The production of alcohols, shown by ceric ion reactive compounds, continued through the sequential transfers and did not decrease until transfer was unsuccessful. In addition, the number of sequential transfers showed a dose response in relation to the concentration of added peptide with the highest concentration surviving the most transfers. Addition of peptide SEQ ID NO:143 was able to prevent culture degeneration in terms of the number of sequential transfers and production of total alcohols.

[0097] Under these experimental conditions, and knowledge of the growth of C. acetobutylicum in culture, it was determined that each sequential transfer was equivalent to about seven bacterial generations (Kashket, Applied and Environmental Microbiology 59:4198-4202, 1993). In other words, the first transfer took place after about seven bacterial generations and by the fifth transfer about 35 bacterial generations have been completed. The number of population doublings or bacterial generations observed in batch culture is expected to be comparable in continuous culture. From these results, an estimate of extended serial propagation in continuous culture may be made from the sequential batch transfers in batch culture, and the expected number of population doublings or bacterial generations per transfer. An estimate of extended serial propagation in continuous culture may be expressed as extended time in continuous culture by taking the dilution rate into account. In continuous culture, the time for one generation is equal to the inverse of the dilution rate. Accordingly, it may be expected from the above data, that the addition of peptide SEQ ID NO: 143 to C. acetobutylicum in continuous culture, maintained at a dilution rate of 0.05/hour, would extend the time in culture about five-fold from about 140 hours to about 700 hours.

### Example 7

[0098] Effect of peptide SEQ ID NO:145 addition on sequential batch cultures of C. beijerinckii NCIMB 8052 grown at 30° C. Spores of C. beijerinckii NCIMB 8052 were germinated and grown overnight at 30° C. under anaerobic conditions in YEPG medium. After about 24 h of growth, 754 of the culture was transferred (transfer 1) to each of four flasks that contained 10 mL of YEPG and either had no treatment or were treated with peptide SEQ ID NO:145 (see Table 8) at 1 nM, 10 nM or 50 nM. Thereafter, 75 μL of each culture was transferred, at the same time, every 24-48 h to 10 mL of fresh YEPG that contained the same peptide treatment or no treatment. Each culture was stopped after 96 hours of incubation and optical density, pH and ceric ion reactive chemicals were measured. Sequential batch culturing was continued through 6 transfers at which point all cultures appeared to be growing to the same extent (Table 12 and FIG. 4). However, addition of peptide SEQ ID NO:145 appeared to slow the growth of the treated cultures during 96 h of incubation in a dose dependent manner (data not shown). Also, addition of 50 nM peptide SEQ ID NO:145 slightly decreased the final optical density of transfers two and three, compared to the other three cultures, and the optical density increased to values similar to the other cultures by transfers five and six.

TABLE 12
Optical density at 600 nm of C. beijerinckii NCIMB 8052
96 h culture broths following sequential transfers in the
absence and presence of peptide SEQ ID NO: 145.

Peptide SEQ ID NO: 145 Concentration

| Transfer | 0 | 1 nM | 10 nM | 50 nM |
|---|---|---|---|---|
| 1 | 2.066 | 2.086 | 2.080 | 2.102 |
| 2 | 2.117 | 2.086 | 2.093 | 2.023 |
| 3 | 2.101 | 2.106 | 2.078 | 1.936 |
| 4 | 2.142 | 2.115 | 2.108 | 2.061 |
| 5 | 2.114 | 2.090 | 2.069 | 2.120 |
| 6 | 2.066 | 2.075 | 2.062 | 2.046 |

[0099] Final pH values of the fermentation broths did not mirror the growth data as measured by optical density (Table 13 and FIG. 5). While the final pH of all cultures decreased through the third transfer, the pH of the culture treated with 10 nM peptide SEQ ID NO 145 was the lowest at the third transfer while the pH of the culture treated with 50 nM was the highest. After the third transfer, final pH values of all cultures rose and stayed at about pH 5.3.

TABLE 13
Final pH of C. beijerinckii NCIMB 8052 96 h culture
broths following sequential transfers in the absence
and presence of peptide SEQ ID NO: 145.

Peptide SEQ ID NO: 145 Concentration

| Transfer | 0 | 1 nM | 10 nM | 50 nM |
|---|---|---|---|---|
| 1 | 5.3 | 5.3 | 5.3 | 5.4 |
| 2 | 5.2 | 5.3 | 5.3 | 5.3 |
| 3 | 5.1 | 5.1 | 5.0 | 5.2 |
| 4 | 5.3 | 5.3 | 5.3 | 5.3 |
| 5 | 5.3 | 5.3 | 5.4 | 5.3 |
| 6 | 5.3 | 5.3 | 5.3 | 5.3 |

[0100] The presence of ceric ion reactive chemicals, which reflects total alcohols concentration in the fermentation broths, was also affected by the addition of peptide SEQ ID NO:145 in sequential batch cultures (Table 14 and FIG. 6). Cultures treated with peptide SEQ ID NO:145 all showed pronounced decreases in ceric ion reactive compounds which rebounded to the level observed in the untreated cultures by the fifth and sixth transfers. While the cultures treated with 1 nM and 10 nM of peptide SEQ ID NO:145 had their lowest values at transfer 2, and then increased with subsequent transfers, the culture treated with 50 nM continued decreasing after transfer 2 and had no ceric ion reactive compounds at transfer 3. The impact of peptide SEQ ID NO:145 treatment also had a dose response effect on ceric ion reactive compounds such that the 50 nM treatment reached the lowest value overall, the 10 nM treatment was next lowest and the 1 nM treatment was next but still lower than the untreated cultures.

TABLE 14
Optical density of ceric ion reactive compounds measured
at 500 nm in C. beijerinckii NCIMB 8052 96 h culture
broths following sequential transfers in the absence
and presence of peptide SEQ ID NO: 145.

Peptide SEQ ID NO: 145 Concentration

| Transfer | 0 | 1 nM | 10 nM | 50 nM |
|---|---|---|---|---|
| 1 | 0.065 | 0.065 | 0.050 | 0.060 |
| 2 | 0.056 | 0.032 | 0.008 | 0.023 |
| 3 | 0.044 | 0.054 | 0.025 | −0.002 |
| 4 | 0.068 | 0.041 | 0.047 | 0.039 |
| 5 | 0.062 | 0.061 | 0.065 | 0.051 |
| 6 | 0.061 | 0.062 | 0.055 | 0.059 |

[0101] Addition of peptide SEQ ID NO:145 to broth cultures of C. beijerinckii NCIMB 8052 did not affect the number of times that cultures could be transferred, through six culture transfers, in comparison with an untreated culture. Peptide treatment slightly decreased end point growth measurements through the fourth transfer and that was most evident in cultures that had the highest peptide concentration. In addition, the peptide treatments slowed the growth of cultures in a dose dependent manner through the 96 h incubation period (data not shown). Finally, the presence of ceric ion reactive compounds was decreased in peptide-treated cultures through the fourth transfer, and the greatest decrease was seen in cultures with the highest peptide concentration. Ceric ion reactive compounds in peptide-treated cultures returned to about the same level as in untreated cultures by the sixth transfer. In this case, peptide treatment seemed to transiently increase culture degeneration in terms of production of total alcohols: Therefore, the gene sequence that encodes peptide SEQ ID NO: 145 is a potential candidate for genetic modification to reduce or eliminate formation of the peptide, which should reduce or eliminate the antagonistic effect on growth and butanol formation.

### Example 8

[0102] Effect of peptide SEQ ID NO:143 addition on sequential batch cultures of C. acetobutylicum ATCC 824 grown at 37° C. Spores of C. acetobutylicum ATCC 824 were germinated and grown overnight at 37° C. under anaerobic conditions in YEPG medium that either contained 50 nM of peptide SEQ ID NO:143 or no added peptide. After about 24 h of growth, 10 μL of the untreated culture was transferred (transfer 1) to each of two flasks that contained 10 mL of YEPG with either no treatment or with 50 nM peptide SEQ ID NO:143. At the same time, 10 μL of the culture that was germinated in the presence of peptide SEQ ID NO:143 was also transferred to 10 mL of YEPG that contained 50 nM of peptide SEQ ID NO:143. Thereafter, 10 μL of each culture was transferred, at the same time, every 24-48 h to 10 mL of fresh YEPG that contained the same peptide treatment or no treatment. Each culture was stopped after 72 hours if incubation and optical density, pH and ceric ion reactive chemicals were measured. Sequential batch culturing was continued through 3 transfers at which point the untreated culture and the culture that was germinated and transferred in 50 nM of peptide were still growing, while the culture that was treated with peptide after germination had stopped growing (Table 15 and FIG. 7).

TABLE 15
Optical density at 600 nm of C. acetobutylicum ATCC 824 72
h culture broths following germination and sequential transfers
in the absence and presence of peptide SEQ ID NO: 143.

| | Peptide Concentrations (nM) | | |
|---|---|---|---|
| Transfer | 0 | 50 | 50-50^{a} |
| 0^{b} | 2.010 | | 2.121 |
| 1 | 1.954 | 1.891 | 1.715 |
| 2 | 1.869 | 0.011 | 1.858 |
| 3 | 1.848 | 0.100 | 1.485 |

^{a}C. acetobutylicum spores were germinated in the presence of 50 nM peptide SEQ ID: NO 143.
^{b}The cultures of germinated C. acetobutylicum spores were not considered culture transfers.

[0103] The final pH of the culture that was treated with peptide after germination was similar to the other two cultures at the first transfer, but then rose to pH 6.0 with no apparent growth and then decreased to pH 5.5 at the third transfer with a slight amount of growth (Table 16 and FIG. 8). The decrease of culture pH and slight increase in optical density (see Table 15, above) suggested that the growth of this culture was inhibited but it was still metabolically active. Final pH of the other two cultures remained similar through the three transfers, although, pH of the culture that had been germinated in the presence of peptide SEQ ID NO:143 was higher than that of the untreated culture at the third transfer.

TABLE 16
Final pH of C. acetobutylicum ATCC 824 72 h culture
broths following germination and sequential transfers
in the absence and presence of peptide SEQ ID NO: 143.

| | Peptide Concentrations (nM) | | |
|---|---|---|---|
| Transfer | 0 | 50 | 50-50^{a} |
| 0^{b} | 4.1 | | 4.1 |
| 1 | 4.2 | 4.4 | 4.5 |
| 2 | 3.8 | 6.0 | 3.8 |
| 3 | 3.8 | 5.5 | 4.6 |

^{a}C. acetobutylicum spores were germinated in the presence of 50 nM peptide SEQ ID NO: 143.
^{b}The cultures of germinated C. acetobutylicum spores were not considered culture transfers.

[0104] The presence of ceric ion reactive chemicals was also affected by the addition of peptide SEQ ID NO:143 during germination and subsequent sequential batch cultures at 37° C. (Table 17 and FIG. 9). At the first transfer, all cultures were positive for ceric ion reactive compounds, although, both peptide treated cultures had higher measurements than the untreated culture. Both growing cultures (see Table 15) had optical density readings less than zero at the second transfer, and the untreated culture continued to decline at the third transfer while the culture that had been germinated and grown in the presence of peptide SEQ ID NO:143 returned to a positive value.

TABLE 17
Optical density of ceric ion reactive compounds measured
at 500 nm in C. acetobutylicum ATCC 824 72 h culture
broths following germination and sequential transfers
in the absence and presence of peptide SEQ ID NO: 143.

| | Peptide Concentrations (nM) | | |
|---|---|---|---|
| Transfer | 0 | 50 | 50-50^{a} |
| 0^{b} | 0.005 | | 0.028 |
| 1 | 0.061 | 0.116 | 0.152 |
| 2 | −0.061 | 0.000 | −0.063 |
| 3 | −0.095 | 0.001 | 0.138 |

^{a}C. acetobutylicum spores were germinated in the presence of 50 nM peptide SEQ ID NO: 143.
^{b}The cultures of germinated C. acetobutylicum spores were not considered culture transfers.

[0105] Peptide treated cultures responded differently at 37° C. than at 30° C. At 37° C., the untreated culture survived through 3 transfers while the treated culture did not grow beyond the first transfer. However, when the culture that was germinated in 50 nM of peptide SEQ ID NO:143 and then transferred with peptide treatment, the culture continued through the third transfer, although to a slightly lower final value at 72 h compared to the untreated culture. Also, while ceric ion reactive compounds produced by the untreated culture decreased steadily from the first through third transfer, the culture that was germinated and transferred with peptide treatment oscillated from a high value at the first transfer to a lower value at the second and back to a high value at the third transfer. At 37° C., peptide treatment during germination and growth prevented culture degeneration in terms of production of total alcohols.

### Example 9

[0106] Effect of peptide SEQ ID NO:145 addition on sequential batch cultures of C. beijerinckii NCIMB 8052 grown at 37° C. Spores of C. beijerinckii NCIMB 8052 were germinated and grown overnight at 37° C. under anaerobic conditions in YEPG medium that either contained 50 nM of peptide SEQ ID NO:145 or no added peptide. After about 24 h of growth, 10 μL of the untreated culture was transferred (transfer 1) to each of two flasks that contained 10 mL of YEPG with either no treatment or with 50 nM peptide SEQ ID NO:145. At the same time, 10 μL of the culture that was germinated in the presence of peptide SEQ ID NO:145 was also transferred to 10 mL of YEPG that contained 50 nM of peptide SEQ ID NO:145. Thereafter, 10 μL of each culture was transferred, at the same time, every 24-48 h to 10 mL of fresh YEPG that contained the same peptide treatment or no treatment. Each culture was stopped after 72 hours of incubation and optical density, pH and ceric ion reactive chemicals were measured. Addition of peptide SEQ ID NO:145 appeared to have no effect on endpoint measurements of the growth of C. beijerinckii NCIMB 8052 after germination or during sequential transfers of cultures at 37° C. (Table 18 and FIG. 10). All three cultures stopped growing at the second transfer. Likewise, there was no apparent effect on endpoint measurements of pH or ceric ion reactive compounds (Tables 19 and 20 and FIGS. 11 and 12).

TABLE 18
Optical density at 600 nm of C. beijerinckii NCIMB 8052 72
h culture broths following germination and sequential transfers
in the absence and presence of peptide SEQ ID NO: 145.

| | Peptide Concentrations (nM) | | |
|---|---|---|---|
| Transfer | 0 | 50 | 50-50^{a} |
| 0^{b} | 1.172 | | 1.158 |
| 1 | 1.472 | 1.313 | 1.420 |
| 2 | 0.012 | 0.011 | 0.011 |

^{a}C. beijerinckii spores were germinated in the presence of 50 nM peptide SEQ ID NO: 145.
^{b}The cultures of germinated C. beijerinckii spores were not considered culture transfers.

TABLE 19
Final pH of C. beijerinckii NCIMB 8052 72 h culture
broths following germination and sequential transfers
in the absence and presence of peptide SEQ ID NO: 145.

| | Peptide Concentrations (nM) | | |
|---|---|---|---|
| Transfer | 0 | 50 | 50-50^{a} |
| 0^{b} | 4.1 | | 4.1 |
| 1 | 4.1 | 4.1 | 4.1 |
| 2 | 6.4 | 6.5 | 6.6 |

^{a}C. beijerinckii spores were germinated in the presence of 50 nM peptide SEQ ID NO: 145.
^{b}The cultures of germinated C. beijerinckii spores were not considered culture transfers.

TABLE 20
Optical density of ceric ion reactive compounds measured
at 500 nm in C. beijerinckii NCIMB 8052 72 h culture
broths following germination and sequential transfers
in the absence and presence of peptide SEQ ID NO: 145.

| | Peptide Concentrations (nM) | | |
|---|---|---|---|
| Transfer | 0 | 50 | 50-50^{a} |
| 0^{b} | −0.010 | | −0.017 |
| 1 | −0.030 | −0.026 | −0.038 |
| 2 | −0.001 | 0.006 | 0.002 |

^{a}C. beijerinckii spores were germinated in the presence of 50 nM peptide SEQ ID NO: 145.
^{b}The cultures of germinated C. beijerinckii spores were not considered culture transfers.

[0107] Although the endpoint data for C. beijerinckii NCIMB 8052 grown at 37° C. look identical at transfer 1, regardless of treatment, visual observations through the course of growth indicated that the untreated culture grew first whereas the treated culture grew later. Peptide SEQ ID NO:145, therefore, had a repressive effect on germination and growth of C. beijerinckii NCIMB 8052 when grown at 37° C. The gene sequence that encodes peptide SEQ ID NO: 145 is a potential candidate for genetic modification to reduce or eliminate formation of the peptide, which should reduce or eliminate the antagonistic effect on growth and butanol formation.

[0108] All publications and patents cited in this specification are hereby incorporated by reference in their entirety. The discussion of the references herein is intended merely to summarize the assertions made by the authors and no admission is made that any reference constitutes prior art. Applicants reserve the right to challenge the accuracy and pertinence of the cited references.

The application's sequence listing, which the Patent Office published only in electronic form, follows.

SEQUENCE LISTING (148 sequences)

SEQ ID NO: 1 - protein, 285 aa, Bacillus thuringiensis
MQAEKLGSEIKKIRVLRGLTQKQLSENICHQSEVSRIESGAVYPSMDILQGIAAKLQIPIIHFYEVLIYSDIERKKQFKDQVIMLCKQKRYKEIYNKVWNELKKEEYHPEFQQFLQWQYYVAAYVLKKVDYEYCILELKKLLNQQLTGIDVYQNLYIENAIANIYAENGYLKKGIDLFEQILKQLEALHDNEEFDVKVRYNHAKALYLDSRYEESLYQVNKAIEISCRINSMALIGQLYYQRGECLRKLEYEEAEIEDAYKKASFFFDILEMHAYKEALVNKISR

SEQ ID NO: 2 - protein, 376 aa, Bacillus thuringiensis
MGAYIMSVSVKGNEQLTSLLNDWYRAMLSQQVIKATNLKKKIDEKINKLSIEPDQEHQDQNLLLYYSLLEFRYKVLTDSLGIQQNSFDTISDYDMPTDQFLRFYYHFFKSIHSTFISNYTEAEEHYKLAEKILVAIPDEIEHAEFYYRIATFYHHTYNNLASIEYANKSRAIFSKYEGYEVKTAFCNSLLGGCCIYLKQYEQAEEYLHCAIDLLQKNREEDSLLYVKNTMGWLYSDQSMSTLAIRHLSEVTEKIPTHFKAIFLQAKEHYKLGEQSTASQLIDKGLQICRKIHNEEYTHHFSILKRLNENIPLEELEKIIQEGILYFKEEELWEYVVEYAELFATKCRQLENHQKVSDYFHICYQARQKSIAKGVLK

SEQ ID NO: 3 - protein, 364 aa, Bacillus thuringiensis
MGADVVTREQMKHSLDDWYRVMLQQNIEKATEMKEEIDNKISGLDVDQELSLYFTLLDFRYKMLTDWLNIKENSFERIESFEIPTKGFLAYYYHFFKGIYCTSMSKYSDAKESYEKANKLLKYASHSLENAEFDYRMGNFYYQTYQQVNAIDYLRKAKEEFKKHIGCEINIALCENAFGLCCVDLKNYELAEESFNAAMDIFQKVNYEKYILMVRHNLAFLYASQDLSELAVRHASEVTKKQPKFFKALFVEARECYKLGQYQLAADLVEKGLDICKELNKEEFQYRFMILKSVNEKSPTLSLEQVVLEGIIYFEKEELWECIQEYAEMLALRFYKEENHNKASHYFYMSHKAQKNLLKKGALK

SEQ ID NO: 4 - protein, 382 aa, Bacillus subtilis
MKSGVIPSSAVGQKINEWYRYIRTFSVPDAEVLKAEIQQELKHMQHDSNLLLYYSLMEFRHQLMLDYLEPLEKLNIEDQPSLSELSRNIDSNQADLKGLLDYYVNFFRGMYEFDKREFISAITYYKQAEKKLSFVADHIERAEFYFKIAEAYYYMKQTYFSLINIKNAYEIYVEQETYNVRIIQCHFVFGVNLMDERNFEQAARHFKLALNMAQAEQKAQLVGRAYYNLGLCYYNQDLLDPAIDYFEKAVSTFESSRIVNSLPQAYFLITLIYYKQGKHDKASEYHKRGYEYAKETDDADYAVKFEFLQSLYQDQPNEEGIERCFQYLKNKNMYADIEDLALEVAKYYYEKKWFKLSASYFLQVEEARKQIQRSEGLYEIEI

SEQ ID NO: 5 - protein, 419 aa, Bacillus thuringiensis
MQQTLEKIGKQVFYKRLQQKMTQEELCQGICSVSYLSKIENGKIEASEEILQLLCARLEIAVTDLRDVEEDVKGKLDEWLNALVHLDKPQVERIYEELQGEMKHVLDFEIINYYKLLYTRYLMMKRDLPAVEEELERLKKVYKKYSPFQKMLYTYNKALLYSVQYKYTQALEYLLKTEAMAKELGYYETGIYYNLALTYSQMEIDHMTLYFANVALEGFKSEYKFRNIINCKFLIAFSYTRKKQYNEAMEIYNHIIREATSFADKDNILSIALNNIGYLYYRQKNYTKAKEYYIECLKYKKEEDMNYIDAMYELSLQCIQLGEIEEAAKWIEKGIIAARKDDRYKGMLYLLLSLRYKHFEERDVYKKFLEIEVVPFFKAEENIKDLKKIYLELAEYLEECSDFKESNRYYKLAINLLEE

SEQ ID NO: 6 - protein, 317 aa, Enterococcus faecalis
MFKIGSVLKQIRQELNYHQIDLYSGIMSKSVYIKVEADSRPISVEELSKFSERLGVNFFEILNRAGMNTKSVNETGKEKLLISKIFTNPDLFDKNFQRIEPKRLTSLQYFSIYLGYISIAHHYNIEVPTFNKTITSDLKHLYDKRTTFFGIDYEIVSNLLNVLPYEEVSSIIKPMYPIVDSFGKDYDLTIQTVLKNALTISIMNRNLKEAQYYINQFEHLKTIKNISINGYYDLEINYLKQIYQFLTDKNIDSYLNAVNIINIFKIIGKEDIHRSLVEELTKISAKEKFTPPKEVTMYYENYVAIENNPIPEIKEQS

SEQ ID NO: 7 - protein, 275 aa, Enterococcus faecalis
MNSLGAVIKEIRKNRKLTQKMLSEDICSQSVLSRIENNEELPNVLVMQQLCDRLGVTVDQIMRYKSGDVHVVTYSFEKMAEYFRHKKYQLLLNYLKENRIEEQLYLDTDWQKYYYYLGSCELFVLNDYEKAIASLRKGLSFTYKADKLNVSDLEIQLISCLGATYGYMGNRVEAERFLSLSIHYFNQLPNERSNAELTKIFFNYADFLFKNYTEKDAEIYVDQGITWARKKNSYYYLSELLNLKYLVLMRKNKHEEAERYLNLAQQMKNVESGNL

SEQ ID NO: 8 - protein, 294 aa, Bacillus anthracis
MEFYDLGITIKELRIKKNISQSELCHGICSQSQISKIEKGVIYPSSILLYQLSERLGIDPNNIFALTQNKKFKYTENVKCIMKDCIRQHQYKELYEIVTKEKNLNNFRMKEDKQFLIWHEAIAIYRVNNLIKTALTLLNNALKITVTNIDFLTEREIDIMQTMAIFHAENKEYKESINILKRCLNNFDKLDFPRDKEIKLKIIYNLAKCLNYTYQYEEAKKYIDKGIKLAINLNTLYLLGELYYEKGSNLLKLEQSNKEEVADNMKTALFIFELTKNEKKLQIIKEGYFEKHNC

SEQ ID NO: 9 - protein, 321 aa, Enterococcus faecalis
MHLNELMKIQRKSEKLSQAKFYEGIFQRNSASLFENHNEHFLKIADLPILADRSNLTIPEIIRTCNEDFKSVFDKDLETYYFVLSKIQQNPDSEYNQELYSLYQKSIHEKFTSLKYMNLYLLIKLQTSSLISEIIPVDKQDLADIKKMFSSSKRFVLYHYKILSNLCTIFPYSDLQTLIEQLFPLREDSDEQIKDTACLSLSNAIALSIFTKDYSSCFILLNHFETLLSNYTSYKYKLSFIASRNMLLYFTSGDIEHIMKVFSYVEILKQVESPEYVEQFHKNLQTIISKSDDEKAKQIFGVLDDDGQVLDPKNFDHKKID

SEQ ID NO: 10 - protein, 296 aa, Listeria monocytogenes
MVAYGELIREVRLSKGLTQKEVYTGVISKSYAIGFEKGKHDITLVLFEEILERVMLSSDEFFFMNRGYSLAEEDNFWYKFANAANQKSLADLQELYQEVLQQTGDRANLRKAIVHSRMEINEQFLLNNRFDVSIVSEKDKAVIQTYLWKVQSWTLEEIRIFANSVDYFEEDVQIYFFQLVLKSLEKYKHYDRGKKVFSTLLSNIIEELITRNQLEYAAQLLEILHELSSTHDCAFYRIMHNYYQGLIWMKNDQVEQGLKESKSAIRILDVLDYKSLAQLYNTLLQQFLEKENIQIV

SEQ ID NO: 11 - protein, 297 aa, Lactobacillus casei
MEKIGELINHFRENKGMSQAELSEGILSKAQLSKFERDLTKISVDKFLALLERLHVTFTEFGNALAIQERLYEQAILEDITKAVINNNKDQAQLVKERAEQHLKKHHGKYNQLTLIMVKAMICDMEKGTLPKADTKVLADYLFSVDGWTHFELLLFGNTMSALSLVTVNQLARELAAQINEAWAIHQNFQLTINLLYNVVILNLSAKDLTTARLFLRVMKHSHVEDSMMAERYLIALADAFCDYCGEPTVEHENNVKRMIEIQKEIGSTNFFVAFNNQAKMFISETKISSNDSAGNV

SEQ ID NO: 12 - protein, 289 aa, Streptococcus gordonii
MTQLGQVFRFFREARHISLSEATGGEFSKSMLSRFENGQSELSAQKLFSALSAIHTETEEFTVAAGIQDHHSHKELLNQIQELLQTNQLNLLEKLYLEKKKISQKSKESNDWVERLIVKAYLCALKESEKASPDELDFLHDYLFSVDIWGRYELKLFSICTPVLFLDLFSQYTKEILSRNDFTALFANNRNTLHTTFLNGYLLAISQENIAHADYFQQVIERHFYEENETYFRIVYLFAQGELACLKGQKKEGLAQMEKAVDIFQILNCQHSADYYQEALEAAFQKYSK

SEQ ID NO: 13 - protein, 284 aa, Streptococcus mutans
MKVNQSMELGELYRELRIARGLKIKDIACKNLSKSQLSRFENGQTMLAADKLLLAISGIHMSFSEFGYALSHYEESDFFKRGHKLSELYAQKDIKGLKKLLEFNDNHEVFDVYNRLNKLVIQVTIHLLDTDYIISDDDKNFLTTYLYNIEEWTEYELYIFGNTMSILSSDDLIFLGKAFVERDKLYISLPSHKKNAELTFLNLILILLERKKLYQAIYFVENLEKLLNYQDMFAITFLKFLKKIITYFHDKSVDMSELEHYINIVEEINPTIASILKSNLNQLL

SEQ ID NO: 14 - DNA, 6000632 bp, Clostridium beijerinckii (residues 1-2,000,211 of 6,000,632)
aacttatccacatgtgtggataaaattgtgcataacttgtttatttttattgttagtacatgctttatagttgattttatttagatcttagcatgtttataacacttaataacagattgttattaaatttctataaatttaatatatacacatagttattaacatgttgatatatttatatacatacttggctataatatatgaatgttaatatccttgttgataaactgtacataactattataaaaatttttttattacaatattggaggaataagaatggatgccgatcttaaaaatttatgggataaaaccttagatattataaaaagtgagctaagtgaagttagttttaatacttggattaaaagctgcgaacctctgtctatttcttctaatactctaaagataagcgttccaaattcctttactcaagatattttagataaaagatataaagatttagttgcaaattccataaaagcagtatgttcaaaattatatacaattgaatttattataatgtctgaaatctatgaaaaagaagaaattaagagttcatcaaatcagaaatcaaaagctattgtagttaatgatgaaatgtcgtctacattaaatccaaaatatacttttaattcttttgtaataggtaatagtaatagatttgctcatgctgcatctttggcagttgcagaatcaccagcaaaagcatataacccgttattcatatatggtggagtcggacttggaaagactcacttaatgcatgctatcggtcattacatcttagatggtaatcctaatgctaaagttgtatatgtctcatctgaaaaatttaccaatgaattaataaacgctataaaagatgataagaatgaagaattcagaaataaatacaggaatgttgatatcttacttatagatgatatacaatttatagccggaaaagagcgtactcaagaagaattctttcatacatttaatgcgttacatgatgcgaataaacaaattatattatcttcagatagaccgccaaaagaaattccaacattagaagataggcttcgatctagatttgaatggggcttaatagcagatattcaagtccctgatttcgaaactagaatggcaatactaaaaaagaaagctgatgttgaaaatctaaatgtagcaaatgaagttatggggtacattgctactaaaattaaatctaatataagagaacttgaaggcgcactaataagaataattgcttactcctcattaactaacagagaagttactgtagatttagctacagaagcattaaaagatataatatctaaaaagcaaggaaagcatgtgactattgacttaatacaagatgtagtttctagttactttaatttgcgtgttgaagatttaaaatctcaaaggcggactagaaatgttgcttacccaaggcaaatagcaatgtatttaagtagaaagctaacagatatgtctttacctaaaattggagaagaatttggaggaagagatcataccacagtaatacatgcttatgagaaaatatctgagaatctcaaaactgatgattcattacaaagtactgttaacgacattacaaaaaaattgactcagaattaatccacagagctgtataataagtacataataacttgtggataatatttttttagttatattatgcttatacttgtggataaccagtctgttttgttactgatttatccacaatatttttgaattaaattttgttgatattacagcgattatactagttatcaacaaattaacagcccctactactattattactataaaaatatttatctaactactaattatcatctttaattcttgtgaataaaataaggaggattttcaatgatctttacatgtgaaaaacaaaaaatattagaaggtatatcaatagttcaaaaagccataacaggtaaatcaacaatgcccatattagaaggtatttatataaatgcaaataattcaacaataactcttataggttcagatatggatgttagtattcaaacattagttgatgcaactattatggaagaaggaagtatagttattgatgctaaaatatttggagaaataataagaaaactacctaattcaactataagaatagaaactatggaaaatcagctaataaaaataacttgtgaaaaatccatatttgatgtagtttatatgaacacaaatgaatttccagagttacctgaaattaatgagaatttaaaaatatcagtaaatcaaaatatattaaaaaatatgataaaagggacttcttttgctatcgctcaagacgaaacaagacctattcttcaaggaatattattcgaagtgagaaataaaaacttaaacctagttgctctagatggatatagactagctataaaaagtgaatttttggatacggatattgatatagaagttgtaattccaggaaaaacattaaatgaagtatcaaagatactagaagatatagatgagattgtggatataacatttactaataaccatatattatttaatttaaaaagaactaaaataatatctagattactagaaggtaagttcataaattataaatcattattaccacaagaacacaaactatttgtaaatgttaatagacaagaactacaaaatgcgatagaaagagcatctctaatggctaaggatggaaatactaacttaataaaattagatttacatcaagataacttagtaataacctctaattctcaattgggaaaggtaagagatgaaatttcgataaaattgcaaggagatgaaatagaaattgcatttaactcaaaatatctgttagatgttttaaagaacatggaggataatgaagttgttatgaaaatgacatctggtataagcccatgtgttattgaagaacataataatgaaaatgcaaaatatttagttttgccagtaagactaatgagataggaggataaatattattttaatatttatataatgaaaatgaataaaataaaaattgatactgaaattataaaattagatgcttttttaaaatgggcatctattgctagctcaggttcagaagctaagatttatgtgcaagatagaatgataaaggttaatggagaagtttgtactcaaagaggtaaaaaattaagaattggagatgtagtaaacttcgaaggttcagattttgaaataatatagagatagttatttgattagttatgatataattattataggtgtatttttatgtatgttaaaaatataaatttgcttaattataggaattataaaaaattaagcgtagaattgactgaaaatgttaatgtgtttgtgggagataatgctcaaggaaaaacaaatattttagaatcagtatattattgtgcttttgcaaaatcacacagaacatcaaaagataaagaattaataaattgggaaaatagtacagcctacataagtttacttatagggaaaaatagattagataaaaaaatcgatataaatatactcagagatggtaagaaagccataaaagtaaacaatataaaagtaaataagataggtgaactatttggaatttttaatgtagtaatgttttctccagaagatttaaaagttataaaagaagcaccaagtttaagaagaagactattagatatggaattatctcaggtaaatccaaactattacttcaatttagtacaatataataaagttttaggcgaaagaaacattttattaaagagcaggtcatttagtgaagatatcttagatgtatatgatatacaattaagtaaatatgctgattatattatttcaaaaaggttagaatatataaataagataaatttttacggtgatataattcatagagaaattacatctggaaaagaagaaataaactttaaatataattgtactgttaatctagagaatggaaaatttaaagataattatttaaaaaaactaaaagataatattcaaaaagatagggaaaaggggttaacatctgtaggacctcatagagatgattttagcgtatttataaataatattgatactaagattttcggatctcaaggacaacaaagaacatcgattctaactatgaaatttgcatctttaaaaatcattagagagattacaggcgaatatccagtattattgttagatgatgttttatcggagcttgatttaaataggaaaaaatatatattaagatcaataaaggatatacaaactataataacatgtgctggaattgaggatttaaatgattatttagatgataaagtcaagatatttaatgtatcaaacggacaaattttaaatcaagggaggaatatataatgtttttgcatttaggtgaaaatgtagtagttcccattaaagacattattggaatattcgatcttcaaaatacgatgtatagctctgacacaatacaatttttaagactagcagaagaagacggatttgtagaaagaataacagaagaaaagccaaagtcgtttataatagcagaagtagataataagagtaaaatatatttatcaccaatatcatcaactacattaacaaaaagaacagatatagaatatagttcttagttccataaaattaaaaattttaataatacttattaagtttaggaggagtctgatttggaacaaaataacagaaaatatgatgaaaatcagatacaagttcttgaaggattagaagcagtaagaaaaagaccaggaatgtatattggaagcactagttcaagaggccttcatcatttagtatatgaaatcgtagataatagcattgatgaggctttagcaggatattgtaataagatagaagtatacattaatgaggataattcgattacagtaaatgacgatggtagagggatgcctgtaggaatacatcctaagatgggaaaatcaactgttgaagttataatgacaatattgcacgcaggtggtaaatttggagggggaggatataaggtttcaggtggattacacggagttggtgcatctgtagttaatgctctttcggaagaatgtactgtcacagttaatagagatgggcatatatggcagcagaaatatagtaaaggaaaggttctaaacgaacttacaaaagtaggggacagtgaccagactggaacacagacatattttaagcctgatgcagaaatatttgatgaaatagtgtttgatttcgaaattttatctcaaagattaagagaactagcattcttaaataaaggaatatatataaggttagtagataaaagagatgagaaagaagaagttttccattacgagggtggaattaaatcctttgttagctacttgaataggaataaagtgccacttcatgaagagcctatatatattgaaggggtgaaagataatatatccgtggaagtagcgcttcaatataatgacggttatactgaaaatatattttcttttgccaacaatattgatacagttgaaggcggaacgcatctagttggatttaaaactgcactaactagagtatttaacgattatgcaaaaaaatttgggcatataaaagagaatgacaagaattttactggtgatgatataagggaaggtctgactggagtaatatctataaaaattgaagagccacaatttgaggggcaaacaaaaactaagttaggaaatagcgaagtaagaggaattgtagactcaattgttggtgaaaatataggtatattccttgaggaaaatcctaacataggtaaaatgattgttgataaggctctaatggctgccagagccagagatgcagctagaaaagcaagagaattaacacgaaaatcagttttggaaagatctacattgccagggaaattagcagattgttcatctaaagacccaagggaatgtgaaatttatatagtcgaaggagattcggcaggtggatctgcaaagcaaggaagaaacagaaaattccaagctattttacctttaagaggtaagatattaaatgttgaaaaacaaagattagatagaatattaaatgcagatactattagatcaatgattactgcatttggagcaggcataggaaatgattttgatgttgagaagattagatataatagaattataattatgacagatgccgatgttgatggtgctcacattagaacattgttactaacatttttttacagatatatgaggaatttaatagatgatgggcatgtatacatagcacaaccaccattatataaagttagtaagagtaaaaaggagtattatgcatatagtgatcctgaattagaaagtgttttatcagagttaggtggaaaagataattctactgatattcaaagatataaaggtcttggagaaatgaatgcgtctcaattatgggatacaactatggatccggaaaagagaattttattaaaagtaaacatagaagatgctatggcagccgatgaaatttttacaatactgatgggcgaaaaagtcgaaccaagaaaagaatttatacaacaaaatgctagaaatgttgttaatttagatatttagtactgaaatacgaggtgaagtacatggattttaatgaaggaaaagttatacctgtagatattaaaaatgaaatgaagaaatgttatatagattatgcaatgagtgttatagttggtcgtgcattgccagatgtaagagacggactaaaacctgttcatagaagaatactatattcattgcaggaattgggattaacccctgaaaagggatatagaaagtgtgcaagaatagttggagatgttttaggtaaatatcatccacatggtgatagttcagtttatgatgcattagttagaatggctcaagatttttcaatgagatatatgctagttgatggacatggaaattttggatcagttgatggtgatagtgcagctgctatgagatatacagaagcaaaaatgaataaaatagcagttgaaatgttaagagatattaataagaacacagttgattttatgcctaactttgatggcgaagagcaagagccagtagtattaccatcaagatttcctaatctcttggtaaatggttcatcaggaatcgcagttggtatggcaactaatattccaccacataatttggctgaaataattgatgggactattatgcttatagataatcctgaaagcacagttttggaacttatgactaaaattacaggaccagattttcctacaggggctaccattatgggtaaagcaggaattagagctgcatatgaaactggtaaaggaaagataatagtaagagcgaatgctgaaatagaagaagaaaacggaaggcactcaataattgttactgagataccatatcaagtaaataaagcaaaacttgtagaaaatattgctgatttagtaaaagataaaaagattactggaatctctgacttgagagacgaatcagacagagacggtatgagaattgtaattgagcttaaaagagatgctaatccaagtgtagtattaaatttattatataagcatacaaagcttcaagatacatttggcattattatgttagcattagttaataatgagccaaaggttttaaatttaaagcaaatactagaaaattatgtagaatttcaaaaagaagttataacaagaagaactatatttgatttaaacaaggcagaggctagagcacatatcttagaaggcttaaagatagcattagataacatagatgaagtaataagtataataagaaattctaatactactgaaattgccaaaaatactctaatggaaagatttgaactttctgaaaagcaatctcaggctatattagagatgagattaagaagattaactggattagaaagaggtaaaatcgaggaagagtataatgagctaatgaaacaaatagaatatttaaaatctattttagctagtgaagaaaaactgttagatgttattaaagaggaactattagaaataaagaatagatactcagatgagagaaaaagtaaaattgaaaaaatagtaaatgaaattgatatagaggatctaattcaagaagaagatgttgtgataacattaacacattcgggatatataaaaagaatttcggccgacacttattcatcacaaagaagaggtggaaaaggaattcaagcaatgtcaactaaggaagatgattttgttgagcacttgatgataacatcaacacattccgatgtactattctttacaaataaaggaagagtgtataaattaagagcttatgaagttcatgatgctggaagacaagcaaaaggaacaaacttgataaatcttatagcaatagaacccgatgaaaagattcaaacagtgcttactgtaacagatgagaaaaaagaaggctttttgtttatgggaactaagcaaggaatagtaaagaagactccgttaagcgagtttaaaaatttaagaaagaatggtttaattgcaataagcttaaaagatggtgatgaactattaaaagtaaagaatacttatggtgatgctaacattatggttgtaactcaaaatggttacgctgttaaatttaatgaaagagatgttagatctatgggaagaactgcatcaggtgttaaagctattaatttaaaagaagatgatatagcagtatgtatggatattgctgttgatggagaagagttattagtaataagtgaaaatggatatggaaagagaacgcctattgctgaatataagcttcaaaataggggcggagtagggctaataacttataaaattagtgagaagactggaaagcttgctggagctacaatttgtaaggtagatgatgaattaatgcttataaattcgagtggagtagctattagaattaatgtagcagatatttctgtaacaagtagatcagcaatgggtgtaacattaatgagaactaatgaagatgagaaggttgttgcaatagctaaaatattaagtagtgatgatcaagaaaccgaatctggtgatgaagctgaatctgaatctgaaataaataatatagaagaataatattaaatctaataaattttataaggttataaataaggcataactattgaatatacgttatagccttatttttttataggtattatatattaaaattttataaaaatatatacatatatgccaggtgtatcataataagatatattaagtattatatagatatgttgattaatatgaacataagttaatataattaggctatattacataagtactattgaattattatgttaatataaaaaacgtcgctgaaacacaaaaacactttaattaagtttataaaaagtatttttgagataatttaaaaaaaatttaaaaagttgttgacagtgtataaatcaggtgatatactaagaaagtcgcttgagggtgatgaaaattaataactacaatgagaattgtaggaaagaaaattggtctttgaaaattgaacagaataacataaatacatttaagtaaaccagcaatttttatttgagtaagctaagattaaactttttattgagagtttgatcctggctcaggacgaacgctggcggcgtgcttaacacatgcaagtcgagcgatgaagttccttcgggaacggattagcggcggacgggtgagtaacacgtgggtaacctgcctcatagaggggaatagcctttcgaaaggaagattaataccgcataagattgtagtgccacatggcatagcaattaaaggagtaatccgctatgagatggacccgcgtcgcattagctagttggtgaggtaacggctcaccaaggcgacgatgcgtagccgacctgagagggtgatcggccacattgggactgagacacggcccagactcctacgggaggcagcagtggggaatattgcacaatgggggaaaccctgatgcagcaacgccgcgtgagtgatgacggtcttcggattgtaaagctctgtcttcagggacgataatgacggtacctgaggaggaagccacggctaactacgtgccagcagccgcggtaatacgtaggtggcaagcgttgtccggatttactgggcgtaaagggagcgtaggtggatatttaagtgggatgtgaaatactcgggcttaacctgggtgctgcattccaaactggatatctagagtgcaggagaggaaagtagaattcctagtgtagcggtgaaatgcgtagagattaggaagaataccagtggcgaaggcgactttctggactgtaactgacactgaggctcgaaagcgtggggagcaaacaggattagataccctggtagtccacgccgtaaacgatgaatactaggtgtaggggttgtcatgacctctgtgccgccgctaacgcattaagtattccgcctggggagtacggtcgcaagattaaaactcaaaggaattgacgggggcccgcacaagcagcggagcatgtggtttaattcgaagcaacgcgaagaaccttacctagacttgacatctcctgaattactcttaatcggggaagcccttcggggcaggaagacaggtggtgcatggttgtcgtcagctcgtgtcgtgagatgttgggttaagtcccgcaacgagcgcaacccttattgttagttgctaccatttagttgagcactctagcgagactgcccgggttaaccgggaggaaggtggggatgacgtcaaatcatcatgccccttatgtctagggctacacacgtgctacaatggctggtacagagagatgctaaaccgcgaggtggagccaaactttaaaaccagtctcagttcggattgtaggctgaaactcgcctacatgaagctggagttgctagtaatcgcgaatcagaatgtcgcggtgaatacgttcccgggccttgtacacaccgcccgtcacaccatgagagttggcaatacccaaagttcgtgagctaacgcgtaagcggggcagcgacctaaggtagggtcagcgattggggtgaagtcgtaacaaggtagccgtaggagaacctgcggctggatcacctcctttctatggagaaatctagatcagcatgatgtctgactagtacagatacattattatgtatcaaaatataaaatacttgctcaaaggttacttaagtatttgttctgttcaattttgaaagactaagtctttcaatgttctttgaaaattgcacatagatttaatgtatataaaatacaacaaagccaagaataaatattctttgtgatatgactaataattaggtcaagctacaaagggcgcatggtgaatgccttggcatcaggagccgatgaaggacgcgataagctgcgataagcttcgggtagacgcacatagtcagagatccgaagatttccgaatgaggaaactcacatgggaaaccccatgtatcataaagtgaatacatagctttatgaaggtatacccagggaactgaaacatctaagtacctggaggaagagaaagaaaaatcgattttcttagtagcggcgagcgaaaaggaaagagcccaaaccagagatttatctctggggttgcggacagaacataacgagaaatcatagttaattgaacacaactggaaagttggaccacagtgggtaatagtcccgtaagtgaaaactatgataatcagttctgcaccagagtaccacgagacacgtgaaaccttgtgggaagcagggaggaccacctcccaaggctaaatactacctgatgaccgatagtgaagcagtaccgtgagggaaaggtgaaaagaaccccgggaggggagtgaaatagaacctgaaaccatgtgcctacaaccgatcagagcaccttatgtgtgtgatgatgtgctttttgtagaacgagccaacgagttacggtatgtagcgaggttaagtacttaaggtacggagccgaagggaaaccgagtcttaatagggcgactagttgcatgctgtagacccgaaaccgggtgacctatccatggccaggttgaagcgagggtaaaacctcgtggaggaccgaaccacgttgctgttgaaaaagcatgggatgagctgtggatagcggagaaattccaatcgaactcggatatagctggttctcctcgaaatagctttagggctagcgtcggaaaatgtgagtagtggaggtagagcactgaataggctagggggcatagcgcttaccgaaccttatcaaactccgaatgccacatactatcagtccggcagtcagactatgaaagataagttccatggtcaaaagggaaacagcccagatcgtcagctaaggtcccaaagtgtaagttaagtggaaaaggatgtgggatttctaagacaactaggatgttggcttagaagcagccactcattaaaagagtgcgtaatagctcactagtcaagagatcctgcgccgaaaatgtccggggctcaaacttaccaccgaagctacgggttcacgtttaacgtgagcggtagaggagcgtcgtaatcgggctgaagtcgtaccgtaaggagcggtggactgattacgagtgagaatgttggcattagtagcgagatgtaggcgagaatcctacaggccgaatatctaaggtttcctgagtaaagtttgtcttctcagggttagtcgggacctaaggcgaggccgaaaggcgtagtcgatggacaattggttgatattccaataccactataatcgttattatcgatggtgtgacggagaaggataggatgtgctagctattggatgctagtctaagcgtttagggagttgggattggcaaatccgttccaacaattctgaggcgtaatggggaaggttctacggaaccgaagtatctgattccatgcttccaagaaaagcatctagagagagaagtagtgcccgtaccgcaaaccgacacaggtagatgaggagagaatcctaaggccgacggaagaattgcagttaaggaactaggcaaattgaccccgtaacttcgggagaaggggtgcctgagaaatcaggccgcagagaataggcacaagcaactgtttaacaaaaacacaggtctctgctaaagcgaaagctgatgtataggggctgacgcctgcccggtgctggaaggttaaggggaacacttagtggtaacgcgaaggtgtgaacttaagccccagtaaacggcggccgtaactataacggtcctaaggtagcgaaattccttgtcaggtaagttctgacccgcacgaatggcgtaatgacttgtgcactgtctcaactgcaaatccggcgaagttgtagtgcgagtgaagatgctcgctacccgcgattggacggaaagaccccgtagagctttactgtagcttagcattgaatttcggtattgtctgtacaggataggtgggagactgggaaactagggcgtcagccttggtggagtcgttgttgggataccaccctgatagtattgaagttctaactggatgccatgaaactggtgacaggacattgttaggtgggcagtttgactggggcggtcgcctcctaaaatgtaacggaggcgcccaaaggttccctcagaacggtcggaaatcgttcgaagagtgtaaaggcagaagggagcctgactgcgacacctacaagtggagcagggacgaaagtcgggcttagtgatccggtggtacctcgtgggagggccatcgctcaacggataaaagctacctcggggataacaggctgatctcccccaagagttcacatcgacggggaggtttggcacctcgatgtcggctcgtcgcatcctggggctgaagtaggtcccaagggttgggctgttcgcccattaaagcggcacgcgagctgggttcagaacgtcgtgagacagttcggtccctatccgtcgcgggcgtaggaaatttgagaggagctgtccttagtacgagaggaccgggatggactgacctatggtgtaccagttgtttcgccagaagcatagctgggtagctaagtcgggaagggataaacgctgaaagcatctaagtgtgaagcccacctcaagatgagatttcccatagcataagctagtaagaccccttgaagactacaaggttgataggtcagaggtgtaagtatggtaacatatttagctgactgatactaataggtcgagggcttgaccaatataatcaggttgtaaatacattaaagaaactgtgtgcaattttcaaagaataatattaaaagatacttgacataatatatgtttataagtataatattgtttgtaatgatctcgtgatgatggcatagaggtaacactccttcccattccgaacaggaaagttaaggtctatagcgccgatggtactgcatgggagactgtgtggcagagtaggacgttgcgaggtaatcttgtagattacaagagttaagttaaagaagtttaacttacggatctttagctcagttggttagagcaaccggctcataaccggtaggtctagggttcgagtccctgaaggtccaccatgggggtatagctcagttgggagagcacctgccttgcacgcagggggtcaagagttcgaatctctttatctccaccattaagaagttatgaagtaattcataactttttttattatacaattatttaattatgtatgctatgaataagcataggagatgggaatgtttttatacagaataaaacaattttattgggcaatagaatctatattcattaaggaagatatggaaatgctaaagaagtatcttagtatttctgagttgaacttatttatgaaacttactaaatcagagcggcaacattcaataagagtttgtagaacggctataaaatatatagatgataataatatagttgatatagataaaaaaaggatgtctaagtgtgcattattgcatgacataggaaaattagaatccgaattaaatatattttataaatgcattattgtttttttaaatagtattactcgcggaaaatttttgaagtataataaaaataagaaaataataagttattataatcatccggaaattggagcaagactgattgagagtattaataatgatgaatgcttagaggtaataaattctattaaatatcatcataataaaggtgatattgactcgaaaaatatatatttaaaagtattaagtatatctgatgattgcaattaaaataggagggaaatatgaattctattgagagaagagaggatataattaaattacttctagaaagtaatgagcctttgaaaggcagctttatagcaaaaagatattctgtaactagacaggttatagtaaaagatatagcaattcttagagccaaaggtaagaatataatagcaactccagatggatatataattaatgcaaataataataaagctaaagcaattattgcagtaagtcatactgaagatgagatgattgaggaattaagtatagtaatcaaatatggtggaatgattgaagatgtagtagtggaacatccattgtatggagaaataaaaggaatgcttatgattaagaattataatgagttaaataagtttattgaaaaatataatgaacaaaaagcaaaattactatctgcattaactaatggagttcatcttcacacaatagcagctgaaactcaagatgatattgatttaattatattggaattgaaaaagaacaactttatagtttcagatttggaggactagtaatggattatgatgtgctaattttaggcggtgggataattggatgtgcagttgcctatgaactttcaaaatataatataaatatagctttaattgaaaagggatatgatgttgcaaacgatatttcatttgcaaatacagctgttgtttatgatggttcagaatcaagtagtagtaaaatggctctcttggagaagagaggtatagatataataaggaagcattgtaaaaagttcaatgttagatataataagattggttcattaaggcttttcttagatgagagtagtgagctattaaataaagtgtacagtgattctagggatcgaggaatagacggagttagtataatagatagtgatgaactttataatgtagaaccaagtttaaatttaaaggcaaataaagctatttattctgataatacttcaataatatcaccatataacctagctgtttcatatgcagaaatagctgtagataatggagtgaattttagactagaagaagaggttatagatattaagactatttctaagggattcagagtaactacgaataaaaataagtttacttgtaaactagttattaatacaattccaaatgaatcctttaatgatatgtgtagtaatgtaaaaagcaaaatgaaaaatgaaaaagttaggtgtataatagttaagaaaagcataggtgataacttaaagaaaattattattgaagatatagatgaagaaaattccatgataaaggtgccaatatcggaaaatgaaaatttaattggaattaagattagtgataattttagcgctaaatcagaattaccagaaagaatattgaaaaatataaaaaaagagtcaatagttaatatatttacagaagtatatagcgaaaatgatatgttaatagatgatagtaacttagaggatggttatataaaggttataggaaatcactatgctaaaatatcagttgcaccagcaattgctcaggatattgaaaagaaagttaaagtaagcatgaatataacgaagaagaaggattatattgataaaaagagagaaacatatatatttagagagatgactaaagatcaaataaatagaataatttctcttgataagcgttatggtaatattatttgtaattgcaataatatttctgagggagaaattattgattcaataagaagacctttaggtgcaagaacagtagagggtgtaaaaaggcgtacaggaataggtcttggaaactgcaatggttcaagttgcaatataaagataataaagatattggccagagagatggataaaagtgttttggatatagtagatgattctatggattcacaaattttagttggaagaattaaggaatttaatgaaatttagattggagtaattagtaatgcctaataaagatgtttttaccagtttggttagagtaaaaggtaatatcaattacaaagttgtatcagtaaaaagtaataaaagcgttgagaagcacttatggaaggaattctcaaaggttcttagtaggatttatgttagtactcctacaaatattggcgataatatatgtaagaatatacttaatactggcgtagatataatatgtacaaggaagataaaataatagccaaacactaaagccataaggttatattttattataataatttattttaataaaatattataaaatagttgacataagtataagtaattgatataataatacatgtcattagacgtggaaagatggtcgagttggtttaaggcaccggtcttgaaaaccggcgtgcgtgtaagcgtacctagggttcgaatccctatctttccgccatttttttgtctaaaaatataaagtttatttggaggattactcaagtggctgaagaggcgcccctgctaagggcgtaggtcgggtaactggcgcccgggttcaaatcccggatcctccgccaagcatctaacatttgttaggtgctttttagtataattaattagtcttagtaaaacatatattttatttgttgaaaatttatatatgaattctcaataaatataatttactattctaaattatttgagattctgtaactcatagctaaaattaagtttagataaatgaaaaaattaaatttattgcaataaatatgttgacataaataaaattagttgatataatcatatttgttgtgagacatggaaagatggtcgagttggtttaaggcaccggtcttgaaaaccggcgtgcgtgtaagcgtacctagggttcgaatccctatctttccgccattaaaatagaaggcacatggaggattactcaagtggctgaagaggcgcccctgctaagggcgtaggtcgggtaactggcgcccgggttcaaatcccggatcctccgccaaacatctaacaaattgttagatgttttttttgtttttaattaactttatggagtaaataaacttaagatattataattaatgtatctgcttataaaataaattaattattataagaaggtgaattatgctaagcggcagcaaagtgtatttaagagtactaaaaaaggaagatataagtatattattcaagttacatagtgaagagaaagttaaaaagtataatataataattgatagcatggataataaagtagatttaagaaaagctttaagtataattaatgaagacgataatttaattggttttgtaacgtacaaggagcaaggacattatagtaggatatactgtattggcataacgatagggagtgagtattggggaagaagttatggagtagattctataaaaattcttctaagatatttatttaaaaagctaaatgccattaaagtagaactatacgttgctagttataatatgcgagctataaattgttataaaaaatgtgggtttatagaggaggatattaaaagatattctagctatatagatagagaatatatagatattataattatggggataattagagaaagatataattcatatttaaaatgtgaggatggaaaatacgtatgagtataagatttgtttatggaagatctggaacaggcaagagtaaattttgcattgacgagataaaaaataatattgataagaaattagatttcaataagttaattctattagttccagaacaatatacatttatgactgaaaataaaatattgcatgaaataggagaaaatgctttttttaggacagaggtgctgagttttaaaaaaatggctcataatatttttgaagaatatggtggaagagttaaagagattattaaggaatctggaaggaatatgctaattcatagagttataaatgaaaatattgagtttctggattattttaataggatgtctagagaacaaggatttaatgaaattatatcagaagtgatttcggaatttaaaaaatataatattagcattgatagtataagagcaatagatgagaaaataaatgatgctgaattatatcaaaaggttaaagaattgatgataatttatgaagcatttaacttgaaaatgcatgaaaattatattgatggagatgatgagttaacactactagataaaaagttattagaaagtagcgcgtatgtggattcagaagtctggatagatgaatttactagctttacacctcaacaactagatattataaaggtattagccaagagatgcagaagagttaatataactttttgtattgataacaaatctctaaataacaactctgaagatataactgatgtattcaatattataaagagtactgaaaataaaatattaaagataatgaaagaaaacaacatagcttatgacaagccagtcaacttaaataatgcaattccttataggtttaaaggtaatctggaacttgatcatatagaaaagtattttttttcttacccatttaatgaatatgataagaaccctgagagtataacactttacaaagcaagtaatatttatgatgagatagaaagagtatcaaaaagcattacaagcttggtgagagaaaatggttatagatatagagatatatctgtagtttgtagaaatatagatgattatgaaaaaataatatcagtaatatttaaagattataatattccatactttttagataaaaagattcaattactaagtaatccattgattgtacttataagttctgcttttgaaattttgcttaagaattggtcttatgaaagtgtatttaaatatttaaagagtggcttaactggaatagataattcatatatagataggctagagaactttatattagaatatggggtaaagggttataaatggacatcaaaagaaatagtaaatgagaaatggtttagaggaaatggtgaattgacggatgataaagttttaatagctgaaattatggaagagataagatatccattaatgacttttcataataaagtaaatggaaaacataaagttaaagatatatgttcagctatttatgaatttttagtggatgtaaaagtttttgacagaattaacgaatggattaaaaattttgaagaattaggattagaagataaagttaaggaatatagtcaggttgaaagtatagttatagatattatagatcaagcggtcgatgttataggcgaagagaggttagagtattctgaattttttagaatattaagttctggtttcgccaatgaagagataggaattatacctgtagcattagatcaggttaatattggagatatagcaagaataaagggcagagatgttaaagttctttacatagtaggaattaatgatggagttctaccagcatccaagaaagaggaaggtttattatctgatagagatagaacaacattaggtgaggttggaataaatttatcatcaacaactagaaataaagtttttgaagaacagtatctactatatatggcattaacaattagtagtgaatatttaatgctttcatatccaatggctgattttgaaggtaaatcattaagaccatctatagtaatatctagaattaaaaagatatttcctaatttaattgaagaaagtgcaatttatgatttgaaaattcttgaaaataaatttggcaaaattattgcaccaattccaacatttaatgaacttataatttctatgagaaaagattttgataaggaatatatagagccttactggtctgaggtatatgaatggtttaaaaacaatgatgagtttagggataaagttaaaaatatatttaaggggcttagttactcaaacattggagataaagtttcaaaaaacaaacttagaaaactttatcagaatgacttagaaaagttagtatttagtgtttcaaagttagaaaagtatgcagaatgccctttttcttattttgttcaatatggactaaaagctaaaaatagaaaggtatatgaatttacaccaccagacttaggatcatttgtacacgaaatgcttgattcattcactaataaagttagagaagatggagtactatggtctgatttaagcaatgaaaaatgtaaggagataatatctaaccttattgataagaagttaatggatgaaagtaattctatattaaatagcactaagaaatttaaatatttagcgcaaagatttaaaagagtaatatctaaatctgtttcagttattgcaagtcaaataggaaaaggtgaatttgaagtatttaaaactgaatttgattttggaagttatagctctggagaagctataacattagatttgaatgataatgaaaaggtgtatcttcaaggaagaattgatagaatagataagttagatttagatggcgaaacttatataagaattatagattataaaactggagctaaaaaatttgatttaaatgaaatatattatggattacaagtgcaattattagtctatttagatgcacttataaagaattcaaaatatatacttgataaacaagtaaagccaggagcaatattatactttaaaatagatgatcctataataaaaagcaagaaagaaatgactgacgaagaagtagagaaggaagtattaagtgctttaaagatgaaaggattagtcttaaaagatgcgagggttgtaaaagctatggataaggatatagaaggatattcattggttataccagcatcatttaaggctgatggaggttttaaggcaaccagtgatgttgtaacagaagaggagtttagaatacttagagaatatgtaaataggaagatgatagagatatgtgaagaaatgctaagtggagatattaaaattcagccgactaagaattctaacattgctcattgtgaatactgtgatttttcatcaatatgccaatttgatacagaaataaaagacaataaatacaaaattataataaacaaatctacaaatgatatatggaataatataaaaaaagaaattgataattctaataaattaattaaggttgaaaatgaggaagtatagtgctataaaagaatctaatatattttttattaaaattaattaggttttcttacagttaaagcgattttaattagtacaggagagatttatatatgggtaatacaaaatggactgatgaacagttaagtgcaattgaaacgagaaattgtaatttactagttgcagctgcagcgggctcaggtaaaactgctgttttagtagagaggatcataagaataattactaatgaagagaatccagttgatatagataagttattggttgtaacttttactaatgcagcagcagctgagatgagggaaaggatagcagatgcgatatcaaaggaattagagaataatcctaggtctaaaaatctacagaggcaattaacgctgttaaatagagctaatatcactacaatgcattcgttttgcttagatgtaattaaaaataattaccataggattgatctagatccatcatttagaataggtgatcagactgaaggaatactaattaaatcggaagttattgaagaacttttcgaagataaatatgaggaagaagatattgggttcactaatttggttgagatatttagtagttataaaaatgataataatttaaaaaatttagtattagatttatataactttacaatgtcaggcccatggcctgaaaaatggctcattaatagtgcagaggcctttaatattaaacaattagatgaattagatagaactaattgggtaagagttttagctcaaagcgtaaaaattgagttagatgggtatgttaaaatgttagaaaaggccattgaggttacgagcaaaactgatggattagaaccttatatggataacttattaatggaattaagttatataaagaaggcttatgaatctactgataatggacttgaggcaatgtttaattcattatcatcagtacaattcagtagattaaaatctataaaaaaagataaggtttcagatgagctgtctcaaaatactgtaaaaaaaattagagatgatgttaaaaaaggaatatctgaattattaaataatgcatattcagtaaatccacagcaaatgttaaggaatattcaagggtcatatccctacataaaaaaattgatagaattagttctagaatttagtgctaggtttagtaaacgaaaacgtgaaagaaatatattggattttaatgatttagaacatttatgtttaaaaatattaagtgattatgatgatgagaataatataattccatcaagtattgcaatgaattttaaagaatatttcgatgaggtacttgttgatgagtatcaagattcaaataacgttcaagaaacaataataaacctagtatccagaaaaaatgatgataatcccaatgtatttatggttggggatgttaagcaaagtatatatagatttagacaagcaaaacctgaattattcattgaaaaatataatacatatgattcaagtaatggagtaaatagaaaaattcaattatataagaattttagaagccgaagagaaattatagatggagtaaattacatctttaaagaagtaatgtctgaagttgttggagagttagaatatacagatgaggaggctttaaatttaggcgcagactttaaggaaaataaattcaaagatacaattgttggaggccctattgaagttaatataattgataagagccataatgaaacggttgtagaagataatgaggaacaggaagaaataaataatgttattttagaaggtaggatcgttgcgaaaagaattaaagaactaatgtcaaaaagtgaagatgaacaaatttttaaagttttagataaggaatctggtgaatataggccattaaaatatagggatatagttattctacttagagccactaaaaactggtcagagccattattagatgagttaagtgcagaaggaattccagtgtatgcagatacaggatctggttattttgaatcaattgagattagaacaataatttctcttttaaaggttgttgataatccaatgcaggacattccagtaatatcagtaatgagatctcccattatgggattttcggcagaagaaataagtgatattagacttgtaaaaaaagataattatttttatgaaaatataaaatatataagtgaagaagcttataattcaattaatgaatcttattctgatgtattgatagctaaatgtaagtattttattaattccgttgacaagtggagaaataaatcaatttatatggcaattgatgaatttatatggtatttatatatggatactgcttattatggatatgttggagctatgccaaatggagtgcttaggcaagcaaacttaaaaatactttttcaaagagcaagacaatttgagaaaacgagttttaagggattatttaattttataaattttataaataaacttataaaatcttcaggtgacatgggaagtgctcaagtattaggtgaaaatgaggatgtagtaagaattatgagtatccataaaagtaaggggctagagtttccagtggtattcttatgcgggttaggaaagaattttaaccttatggatttaaataaaagcatattgtaccacgatgaattaggacttgggccagattttatagatataggaaaaaggtttagcataggaactttagctaaagaatcaataaagaaaaagatgaaatttgaaacattgtcggaggaaatgagaatactgtatgtagcatgtactagggcaaaggaaaagttgattatgacaggtacagtaggaaatcttgaaaaatcagctgaaaaatggttaggatcagcatctttagattataatcgtatatccccttcggaagttttaaaaggaaagtcatatttagattggatttgtatgtcactatgccaacatagagatggtagtgtcttatcagaaagttttggaactgaaaatttaatattaaaggatgataattctaggtggaaagttagtttttggaataagggcgacttaattgataagacaaagacagaagtgttagaacaaggtgaaggatatgagttaacaataataaataataaaccatatgataattatttatatgaagaagtagataaaatattatcatataaatatccatttaaagcttcaacaacaattaaaagtaatatttcagtttcagatttaaagagaaggcatgcagaagaagattatgatactgaacaattatacagagaaaaagtaaaagttgttcctaagtttcttcaagaaaagaaaggtcttactccttcagaaaagggtactgcagttcattttgtaatgaaaaaaatagattttaatagagtatcatctacggaggaaattaaagaacaattacacgaattatttgaaaaggagtttttgcttagcgaagaattaaaggtaattaatcctactaaaatactgagcttttttaggtcggatttagggaaaaaaattcttgatttaaattgtaggggagaaaagatttatagagaaatacctttttatacagagataagcagtttagaagtagataaaacacttgataatatatataaggatgaaaagataagattacaaggaataattgattgtttctttgaatataagggagatattatacttatagattacaaaacggattatatcatggaaggccatgaagatgaatttaaagagaaatataggaaacaattagattattatagtgatgcaatatttaagttaacaggtaaaaaggttaaatataagtacttatattcattttatttagaaaaagaaattaaaataatataaatgtttttaagtaaaataataagaaaagcaagaagacaaaaataaatttatcttcttgcttttttaatagttattttattataactttactttctctaggtatgttggtaaagatccatttggcatcatctatagagagtctaatacaaccatgagaagaaggtttattcattgtataatctagaactgtagttttgtctttagcaaatggaactgaatgaaataaaatgtctccagtaatttgagtccagtattttccaccttccttatattcttctgaaaagaaccaatcacctctctctttaatagtaaatgatccaggaggtgtatcctctccacttattccagtggaacaagggaatgctttaaccaagtgccatttatcagcctttcctttataaacataagtcttttgatcttgaatgtttacgtttataagataaggtgttgtactctctatatttaatgtattaatatttttcgatgtaatattggttgtcaaggcacgcgatgaagcttcagcaatagctgaatttttatctaagtattcttgttgtttttcttttatgtctgctatcttttcttttacatctatgtcatcacctaaaagatcattattgtctgaaattttagacatagcttcgctatagtaatcattgctaattaaattatcgcagtaagcaaataaatcctcctttagtttactttttgattcatctaggtatataagtgaatctgtatagttaagatctaaagcagaaacttttttaaagaatgaaatggcctctgaatattgttcattattaaaagaattaataccagagttataatttttaatagaatcttgaattaagtctattgaatcagaagcattatgtagatcatcatcattcactagattataacgttttatttccttaacctgaattaaggcatcttcagaagaaattttcttatcttggatttcatctgataaagtattaattttagttctaagatatttggatacatcatgactaatcatagataatttaaatggattaaagttttgtttagttattaataagttattagcttcagaaaatttataattatcaaaatctgatttgaagttatttaaaagtttattataactgtataactcataaaagcagctagaagataatgttattaacaaagctaatacatatataattcttttaggtaattttttagtttttaactttttataataaaatgtatttatgctcaaataaatgcctcctaatgaagtaactaatatatttagagtgaatttgaataagatattgccgattaatcttttatttaattacaaagtcctcttttatttatataatattgacaataaaagtaaataataaaccttgaagtttaaactaattttaatatgtgttaatatacttaataggccttatgaaagtagacaatatttatctggaggggaaaatgactaataaaactaatttttttataaagcttataacttctatatatgacataaaggttttttctaaatatgcgaaagaaggaatattacgatcaatctcatatgcaatattccttagtttcttattaggaggcttaaagagtgcatttgttcaatataagaattataatttagatataatatctttagtagatcaaacggtagcatatttttcaataatactttttaatttattattaaattccttaattgtatcaattgttgcagcgctttttgcagtatttttaagaatggtagtcaaatatatagctttatattctttaaccttatatgcggctacattgccattaataatacaaataatactagaaatagctaatcctaatataagctttgatactatatttattgttggaacattaacctatgtaatattgatattaaagtatataaaggatgaaataataagaaactatacttagtaatataagcatatatataaatttttcaaattattatctaaatttgtaatattcaattattaaacttaaatgaacaattatataatcttttggaattagaaatatcatatcaaatttatttaatatggttgttagccgggaagttatgtgatattatatattaagggtatatggtaaaaaaagtaaaaaaaattacaaaaggggatttaaaaatggttgaggttaatattttgaaagataatcagattgatagggaaaatatattgaataaaaatgaccttattaagttatcgaaagatgaattagttagcaaacttattaatttatcagaatctaagaaaaatcaagaagattttattttgaatatttcacatgatttgagatcaccattaaatataattttaagtgttttacaatgttacaaggatgattataaagatattaaaaggtatggtaaatgccaggatcacatggatgttataaaaagaaattcatataaaatattaaaacttgtaaacaatctaatagatacaacaaaattagaaaaaaatcattatagtattaaaagagagaatttagatgtaattaatttaatagagtggaatatatcttcaatagataaatatgctaagcagaaggagatctctttagtttttgatacaaatgttgaagagtgcataatggcagtagacccagaagcaatagatagaataataatgaatttaatttctaatgcaataaagttctcgccaaagggaagtaatatatatataaatgcgtggaaaagtataaatcaattaactatttcggtaagggatgaaggaattgggataccaaaggaagagcaaaatacaatttttaatagatttgttcaatcttcaagaaataaaaaatctgagaattcgggaagtgggataggtcttgatctagttagatacttaactcaagctcataatggtagtatcgaattgaaaagtgaagagaattctggttgtgaatttataattaagctaccaatagaaagattacaggatgatgaaaataatagagataaatgtttaaatattaaaagtaaagtggaagtacttgaggtagagttttctgatatatatttgtaaaagtcatcatgaacaaggatagttatctaaaaattaaacctaatttttagataacttattccaaattgtatatgggactaagttgaataatagtattaaatttataaaattatgagaataatcaaattataaacttgattattataaccgcttgtgataagataaacttgttgtgaaaattgaatatggagcgttagttaaacggatataacataccgctacggacggtacattgagggttcgattccttcacgctctgccaaaataaaaagaatgggtaccccattctttttattttataaaactttagtaccaatattttcaccaaatataactttacattcaaaacctaatttagattgttctataatatcagcatctatttctatagatccttgttcaaagaataatatagttgtagatcctccaaatttaaaatagcctttttcatcacctttatttactctaactctaggggaataagtttgaattattgaacctacacatgtagcaccaacctctatatgaagtacatctttaaagttatctgatttaaataaagaccattctcttttattttcacaaaaaagtttaggaacagattttaaagctattggatttacagaataatagtgcccttttataggatgattttcatatggaataccagaatctataaagtgaaatctatgatagtcagtagggcataagcgtaatacaacgcatattccatttttatatttactagctacattatcatcattaattaactcttttaaactataagttaatcccttaatttgaattatattatctaagtcaatgtcttcataggcagttattcttccatctcctggagagattaatatattattatctgaatttattggtctagcatcaaaatttaattctcttgtaaagaaatcattaaaagatttaaattcattaattttcttcttcgacatagccatatcaatattaaagctatctacaaatggtgaaattttggatttgcttagctttgtatcacaatacttcccatataacttagaaaataattttttctttgcaataagttcagtaattgttttaccaactggtgattcataggtccattctatatatttctttccagcgataagttcttcttcataagattttgtagttctattatatacttgaatcataaatacaaatgtcaaaactttattaaataatttagagataacagctctaaagatttataatgttacagttatgacaagtatcctccatttcttattttaattagatatatctagttaaatctatagaataatcatttagtaaataatatagaaaaactgatatattgaataaattatgtgtaacatacatagtttattttttaccttaatattaattttatcacagataatcaaaatttcaaaagtaagattatatgtactgaaagtttcatttttgatataaatagtaatatgtagaattgtggtttaataatgaactaaatgatataatatattgataatattagcataagtaattattgaaaaatgaggagaaatgttatgaacaaaacaaaaaacttgatttttgaatctgcaataaaaatattttctgaatctggatatagaggtgctactatggatgatatagctgccaatgctggacttgtaaaggggacattatactatcatttcaagagtaaagaggaaatatttaatttcattgttgaggagggattgcaaatattacaaaatcaagttattgaagttcagaatatcaatataggtcctattgaaaaattaataaaaatatgtagaatacaattaacatttttatatgggtatacagatttttttaaaatagtaatgagccagttgtgggggactgagcatagacaaaatgaattgcgtcataagatacgaaagtatataaatgaaattgaaattaatataagaactgcaatggaaattggggaaattaaaaaaggagatgtagaacttattgcattccaattttttggatcactatgttcatctgcaatatatgaatctatacatatagagaagataaatttagaagatattatagagagtactattaagtttacattgaatggattaggaatagatataaatagatatatttaaaatatgaagtttatattttagattctagataaatgtaattagttctagtttacacttataattaaatataaatagggagtgtatagagaaacattttttatgagcagtatatataatcattaccaaattgaataaaataacgagggaactgggggatactaatgaaatttttagcgagtgatttagatggaacgctatttagagataacaaaatttcagaaaaggatttagatgcattgaggcgactaaaagcgtttggaaataagataataatttcaacaggaagaagtttaaaaggagtaaatagtattttaaaggaatatccatttgagtatgattacttggttatgtgtaatggtggagtgataatggataacagaaacaatattatacatgagaaatcaataccgaataaaatacaaaatagaataatagctgatttttatgatataggagattccttaatatattatgatgatggaaatgatacttatatgatagaaaataaattagttgatgtttcagctgtagatgctgatttttttaatcatttttctaatagggtaacattagaagaagcattgagtagcgtatcagattcacaaattatgagtgtgtttaatgtatctcaatctatagaaaaatcggaattggtaagagaaaagttgataaatgaatatgatgagtatatagaagcttttagaaatcaagtatttgtagatatagttgcaaagaattgttcaaagggaaatgcaattatgatgattttggaagatgaaaataagggcgttgatagcttatatacggtcggcgattcaatgaatgatatttccatgtttaagattaccaataatagttatacatttaattcagtagaagaactaattaaaccatatgctgataatcttgtagatcatgtttttgaagtaatagaagatatgctaagataaaagattaatttagagattataacttattcagcaaattaaatggaaaataatttattaaagaaatataaaagttcagcaatttatagaaatgctgaactttttattataagtatattacatataatcttaatttatatggttaaattattatttattagaattggaaaattctaagtattcatcaaatgtcatagttctatcaactatagaaccatcatctttaatatctatgattctatttgctatagtttgaacgaactgatggtcatgagaagcaaataatatattactattataatctttcaaaccattatttacagctgtaattgattcaaggtcaaggtgattcgtaggttgatctaacattaatacattagcattagaaagcatcattttagacaacatacatctaaccttttctcctcctgataatacattggcttcttttaatgcttcctcaccagagaataacattcttcctaggaatcctctgatatagctttcagatttttcctctgaatattgtctaagccaatctactaaagaaagattgcaatcgtcaaagtattttgagttatcagctgggaagtaagcattagttatagttattccccatttatattcaccgctatctggttccatttctccagataatattttgaataatgtagttacggctatttcattaccaataagagcaattttatcacctttatttactatgaaattcacgttatctaatactttaacaccatctactgtttttgataaatctttaaccattaagatatcattaccaacttctctttcaggtttaaaacctacaaatggatattttctacttgatggttgaatatcatctaaagtaattttatccaaaagttttttacgagaagtagcctgcttagatttagaagcattagcactaaatcttgcaataaagtcctgtaattccttaatcttttcttcctttttcttgttttgatcttttgacatttgaagagctaattgacttgattcataccagaagtcatagttacctacataaatttttatctttccaaagtcaacgtcagccatttgagtacaaactgaatttaagaagtgtctatcatgcgatacaactataacagttccatcaaagttacctaaaaagtcttctaaccagtttacagcctttaaatcaagaccgttagtaggttcgtctagaattagtattccaggattaccaaataaggcttgagctaaaagaactttaattttttctccaccagtcaattctgatacatttttaaggtgaagatcagttcctatgcctaatccttgtaaaagtgaagatgcttcggattctgcttcccaaccattaagttcagcaaattcaccttctaattcagatgctttaattccatcttcatcagaaaagtcaggtttagcataaatttcatccttttccttcattatttggtatagtctttcatttcccattattacagtttctaggacttgaaaattatcatacttataatgttcttgttttaaaacggacattcttaaattaggagcaattgtaacttctccagtattaggttctatttcacctgataatatttttaagaatgtactctttccagctccattagcaccaataactccataacaatttcctggagtgaatttaaggttgacatcttcaaaaagcttacgtccaccaaatctcaaactaacatttgatacgtttatcaatatatttcgacctcatttcttcttaattgtaataatgcacaattagggaaaaaatcctttctatcgttaaaatatgttatcataaattaatttggaatttcatccttaattgtgcatcgtataaatagtttaactacatgttgcttattatatcatataattaatgatttttgcatttttaagtatttctataattttaaatttttgtattattacttaattgaaattaatattatttataatttttggcactcccaaaacattcatctattattttttcactcatacgtctataaagattactcatgctaacatatgcacatataagtagaagtttctcttcatagtctcctagagaattatcttcattacttattagatttgtaatattatcataaattttagttgaggaagattttaaatcatctaagtttgaatcatatatatcaagaaaggattggtatatatcatgtaatggatattcttcttctttttcaaaagcattaattatggggctcaagatagtttttatatctgtaagggacagtgcaccttttaaattataaattaaccccattaaaataagatgacttttagtatacttcttatttttaattttcattaaaagattacctttggcgtagttattaatcatagttttagtaagaactttgtcatcatcatttcttttagtgtagcttaatttactttcaaatagctgcattacttgatccatatataaatcaatttcaggaaaatcatttaagttaatgttattagatgatttttgtgaatttatatatgcatcaatattaaagtcattcatataatttcactcctcacatagtaatagaaactatgtcattattataattttaatattatcgaaaagaagtagataattcaagcatttatgggtaaaatactatttaataaatagaaaataaacaaaaatagggttgcaatataaaaaaaaatatgaaataattctaatatagcaacacgtagttattaaaactacgtgggaataaatgggagggtaaaagaatggagaaatatttaagagaacctattaatggattaactcattttattggagcagttctatcattatttgcattaatagcaatgctagtaaaggtatatacaaggggaagttctacaataacgtttgtatcagttttatttttcgggataagtatgattttattatatagcgcatcagcaacatatcattcagtaatagcaaatgataaagtaataaaaattctaaaacgattggatcattctatgatatttatattaatagcagggtcatatgcaccattttgcctagtggcgttaaatggaaaggtaggaataaatctatttctagcagtaacaatatgtgcagtaatcggaattgcatttaaattatgttgggtaacttgtcctagatggctcagcagtagcatgtatataggaattgggtggtttgcagtatttgccatatatccaatgtctcaagttttatcttcatttggactatcatggttagttcttggaggaataatgtatacaataggtggaataatatacgcattaaaatcagataaaataaaagtatggctctttggaagacatgaaatatttcatatatttattatgttgggaaccctttgtcattttatctgtgtatttgtatatataatttaaatcagaattttaagttgcattaatctagtaggttatataggggataaaagaaatacttattttaaataaatttagtattccttttatccttatttttttataaaaatataattacattcatatggaactagattgttttattataaaacatcttttaaaacttgataagatatattaggtatagtaagataaattataaagaataaatagactttaaggggatggaaaaatgggctttcgtcaaaggttaaaagatgctagtagaatagtagtaaaggttggatcatcaacattaacttatgataatggaaatattaatttaagtagaattgaaaagctaacgcgcgtattatctgatgtagttaattcaggtaagcaggttacgcttgttacatcaggtgcagttgctgttggtgttaataaattaaaattgaaagaaaagcccgaaagtataagagaaaagcaagcagtagcagcagttggacaatgcgaactaatgcatatatatagtaaattttttggagaatatagccatgtggttgggcaagtgttactcacaagagatgtagtagaagatgatcatattagggaaaatgtatgcaatacatttgaaactttattagataataatataattcctatagtaaatgagaatgatacagtttcaatagatgaaattgagaatatagttagatttggtgataatgataatttatcggcaatagttgcatcattaattaacgcagatttgttaataattttatctgatatagatgggttctatgattcagacccaaggaataatgagagtgcaaaattactaaatgaagttagagaaataactcctgagttagaagagtgcgctggaggtgcaggatcaaatctaggaactggtggaatgatcacaaaattatcagcagctaagacatccacaaaagcaggagtagatatgattttagcgaatggaagtgaaccagatataataatagatattttgaagggtgaagaaataggaactttatttgtatcgtaggtaaaataagaaatgggggctaaaaatgagtgagttaataattaaaggacaaaatgctaaaaatgcttcttatgatcttggtattgcatcaacaaagcaaaaagatgatgcacttatgattatggcagaagagttgataaaggcaaaaggagatataatatcagctaataagatagatttggatgcggcagtattgaaaggtacttcaaaagctatgctagatagattagcacttacagatgaaagaatagaaagtatggcagcagggcttaaagatgttataaaacttcaagatccaataggtgaggtaatatctatgtggcaaagacctaatggattacaaataggtcagaagagagtaccgttaggagttattggaataatttatgaagcaaggcctaatgtaacttgtgatgcagcaggactttgtataaagactggaaatgctgttattctaagaggcggaagtgaagctattaattctaataaagctatagttaaggcattaacaaaaggaattgaaagatctggtttgcctaaggcttcagtacagttagtagaagatacaagtagagaagttgcaactgaaatgatgagattaaatgagtttatagatgttcttattccaagaggtggagcaggattaattcaagctgttcttaaaaatgctactgttccagttatagaaacaggaacaggtaattgtcatatatatgtagataaagactgcgattttgaaatggcaaaaaacattgttattaatgcaaaagcatcaagaccttctgtttgtaatgcagctgaaaagttacttataaatgaaaagatagtggaggactttttgccgatagtagttaaagccttaagagaaaacggcgttgctgttaaaggtgatgaagtatcacaatctataattaacgacattgagaaagctgctgaagaggattggggaaaagaatatttagattatataattgccgtaaaagtagttaaagatgtagatgaagcaatttcgcatataaataaatatggaacagggcattcggaagcaattattacagagagctataaaaattcacaaaagtttttacaaagagttgatgcagcagctgtatatgttaatgcatcaacaagatttacagatggttcagagtttggttttggtgcagaaataggaataagcactcaaaagttacatgccagaggtccaatgggacttaaagaattaacaacaatcaaatatataatttatggaaatggccaaataagataatacagagaatataaagaatattatttcatgatattctttatattcttatatattataatagttaaagataataaattaatattttcatgaataaatcaacataattaagtattgccaaggaaataatcttaaaatatataaagtgtgttgtaataatatatagatatttatatgataaaataataatattaaatagactttataactacaaaaaagtatagtataatccaatgtgaaaacgtatcaaatacatctaaaaagggggacgataattgtgaaaatagcattaatagcacatgacaaaaagaaggaagatattattgaattttcaaagaagtataaggatgtactagctaaatatgagctagttgctacaggaactactggaacgaagatatcagaagcaacaggtcttgaagttaagagatatttatctggtccatatggaggagatcaacaattaggtggtcgtattgcagaaggaaagattgatctagtaatattttttacggatccattgacagcgcaacctcatgaaccagatgtatcagcattgcttagagtttgtaatgtacataatgtagctgttgttactaatataaaaacagcagaacttataattaaacaattttaaattgtggacaaagcagttaaaattatatatacaaaaacaaaatgtagtattaaatttaagataggtcaattcagaattaactgtaactgcctaaattttctgaatattttattaattatataataacataaattatataaatttgcaattagcaatcatttgtgtataaatggagtatgaacatgattataattctaaggtaatagcaaggaaatatagcttgtaaactaatagaatatcttaaaaggaaggattataatgactgatttaaacagatatacattaataactggtggtagtgacggaattggatttgagttagcaaagatctatgccaaaaataaagataatttaattattatagcaaaagacgaaattaagctaaggaatgctaaaagtaggcttgaagatcaatatggagtaattgtagaaataattcaatgtgacctatctgtggataaaggttataaaaagataatagaagttgtggaagaaaagaatttaattgtggataatttaataaataatgcaggcataggttgctttggtttttttcatgatttagaagagggacttgaagaaaagataataaatataaatattacagcattgactatgcttacaaagtacttttctaaaaagatggttgagagaagacatggaggcatcttaaatgtggcatcaacagcagcatttattagtggtcctaaaatgtctatatattattcaagcaaggcatatgttttatcattaacagaagcaatccatgatgagttgaaagatttgggaatcagggtaagttgcctttgtcctgggcctgtaaggacatcatttcaagagaaggctggtataaaaaagtcacaaagatctaaaagatatttaatgaatgctagtgatatagcaaaatatgcttacagagaattttcaatgggcaggacaataattattccaggatataaaaataagctgttgattttaggaaataaattaatccctagagcgttaggaagaagaattatattaaagaataatagttagtatttatattagctattattctttttttatataaatatgcatgtattatatcgatttaaatatggcattattataataaatatttagttacttaattaggatacatattttaattcacatataattaaggattaatatacaaaagcaattatttgaattaatggtatatttatatctaaaataaaaaaatatatgaataaaaattcaaataagtgtatttttatgctttatataatcttatttttatgataagatttatatattgaataaattaaaaataaataagcaatagacaataagtaataaataaaaataattatattaaatattaaactatccttaaattatcttgacacaggattatctatcaactagaatagttagaaagagaaattttaaaagttaagatacactttaacttggtcctgtgaggccaaaaagggaagcataactatgatatttgaaagctgaatgaaaaatttcatagcttattttttgaattcaaatatttgtatggtatatcacaggatagtgaagagatcaggttttctgaaatctctttattatccttttgttttatattaaacaaagattcataaggtgtagttttagcaaaaatatatttgtaggaggcttaagtatgaaagcaaagcttatattagaaaacggcatgatttttgaaggaaaagcttttggatatctaaaagaaagcgttggggaagtagtatttacaactggaatgacaggttatcaagaagtacttactgatccatcttattacggacaaatagtaacgatgacttaccctttaatagggaattatgggataaaccttgaagatatggagtctgattcaataaaagtaagggggtttattgttagagaaaaatgtaatatgccaagtaactttagatgtgaattagaacttgaagattttttaaaacaaggaaaagttattggcttggaaggaatagatacaagagctttaactaaggttttaagaaatagtggtactatgagaggccttatagcactagaagatgttgacgatgaatatgtgaaagaaaaaatagcaggattttctactaaggaagctgtaaagactgttacaacaagtaagttttatgtggttgaaggaacaggaaaacatattgcggttatggatttcggtataaagactaatataataaggaatttcaaaaagagaggctgcaaattaactatattcccagcaacagcaacagcagaagaagttttaaatattaacccggacttaatatttttatctaatggacctggggatccagaagatttagattttgccatagaaaatattaaaaaattagttggaaagaaaccaataacaggtatttgcttagggcatcaattattgggattagcgttaggtggtaaaactactaaattgaagtttggacataggggatgcaaccatcctgttaaagatttagaagctaatattgtgcatataacttcgcaaaatcatgggtatgtagtagagaagttaccagatgacatggaagttactcacgttaatataaatgatggaactgtagaaggaatgaaacataagactttaccaatatactcagttcaatttcatccagaagcatcagcaggtccaaaagacagtgaatatatatttgataagttcttagaatatgcactataggaggttttagtaaaatgccattaaataaagatataaaaaaagttttagttataggatcaggtccgatagtcataggtcaagcagcagagttcgattactctggaactcaagcttgtgaagcattaaaatcagaaggtatagaagttgtacttgtaaattcaaaccctgcaacaataatgactgataaagaagttgcagataaagtttatttagagccattaacattagaatttgttgaaaaagtaatagctaaggaaagaccagacagcttacttgcaggaatgggtggtcaaacaggacttaaccttgcagtagaattacatgattctggtatattagaaaaatacaatgtaaaagtaatcggaacctctattgcatcaattaaagaaggtgaagatagagagttatttagagatatgatgaataggattggagaaccagttataaagagtgaaattgtaactgacttaactgcaggtttggagttcgctaataagattggttatccagttatagttagaccagcttatacattaggaggatctggcggtggtatcgctgatgacgaggaacaacttagaaccatattagaatcgggacttcaactaagcacaattggtcaagttctacttgaaaagagcgttaaggggtggaaagaagtagagtacgaagtaatgagagactcttatggaaactgtattactgtatgtaacatggaaaatatagatcctgttggtatacacactggagatagtatagttgtagctccatcacaaactctttcagataaagaatatcaaatgcttagaacagcatcaataaatataataaatgcagttggaattgaaggtggatgtaatgtacagttctcactaaatccaaatagttttgaatatgcagttatagaaataaatccgagagtttcaagaagttcagcactagcatcaaaagcaacaggatatcccattgcaaaacttgctgctaaaatagctcttggatatggattagacgaaataaaaaatgctgttacacaaaaaacatatgcgtgtttcgaaccaacacttgattatgttgtagtaaaaataccaaaatggcctttcgataaattctttggtgctgacagagaacttggaacaaaaatgatggcaactggagaaattatggctattggagccaattttgagcaagcgtttttaaaaggaattagaagcttagaaataggaaaatattcattagatcataataaatttaaagaatatagtatttcaaaattaaagagcatagtaatgaagcctgatgatgaaagaatctttgcattagctgagatgataagaagagattacatgatagatagaataaataaaattactggaatcgatatgtttttcttagaaaaaataaagtggatagttgaagaagaacaaagattaaaattaagtaaaatagaagatttagataaggaatggttacatcatttaaagaaaaaaggattttctgataaagctatagctgatatgctaaaggttagtccagacgatgtatatagattaagagacatatggagtataaagccttcatataaaatggttgatacttgtggaggagaatttgaagcattatctccatactattactcaacttatgagcaatatgatgaagtagaagtatcaaataataaaaaagttatagttataggttcaggtccaataagaatagggcaaggtattgaatttgactacgcttcagtacattgcgtaaaagcactaaagaaacttggaattgaaactattatagttaataacaacccagaaacagtaagtactgattttgatgtatcagataagttatattttgagccattaacagaagaagatgttttaaatataatagaaaaagaaaaaccagatggtgtaatacttcaatttggtggtcaaacagctattaagcttgcaaacttcttaaaggaacaaaatattgtaacgcttggaactacagcagatcaaatagatatggctgaagatagagaaaagtttgatgaattactagaaagattaggaatatcaagaccaaaaggtaaaggaatatggtctttggaagaaggattagaagaagctaagagattaaagttcccagtacttgttagaccttcatatgtaattggtggtcaaggaatggaaataactcatgacgaagaagagttaacatactacttagaaaatgctttcgctaaagacagtaaaaatccaatacttatagataaatatctaatgggtagagaaatagaagtagatgccatatcagatggagagaatattttaataccgggtatcatggaacacttagaaagagctggagttcattcaggggatagtgtaactatgtatccaagccaaaatatatctgacaaaattaaagcagatgtattagagtatactaaaaaattagcattagcaattgggataaagggtatgataaatattcaattcatagaatttgaaggagaattatatgtaattgaagttaatccaagggcatcaagaacagtaccatatataagcaaggtaagtggagttccaatagtagatttagctacacaagtaatgcttggcgctaaattaaaggaattgggatatggaatagatgtatataaggaacctgaactagtttcagttaaagttccagtattctcaactcaaaagttacctaatgttgaagtaagcttaggacctgaaatgagatcaacaggagaagttttaggagttggtagaaacataaaggaagcactttacaaaggatttgttggagcgtatatgtatccttcaaaggaaaaaggaaaaatacttgctacaataaataagcatgataaggcagaattcctaccaatagcaaaagatctagcatcagtaggatacaaatttattgcaacatcaggaacttgcgctttattgaaggaagcaggtatagaagtagaagaaataagaaagatagatgaagaagaaccaaatattttagatatagttaaaaacagagaagtagacttagttgtaaatactccaacaaaaggaaatgattcgaaaagagatggtttcttaataagaagagcagcagttgagagaaacttaggagtgattacagcattagatacattaagagcaattgcagatgtggaacttgagaagtttgatgagaataaggatttggaagtattcaatatagcaaaataaaaattaatgagttaaagcagtattaaaaagactactcaagttactgcacttatttaaaaattaaaactaggatatgacagatgatatcctagtttttttcatgaaatatattattaaaaggaaatattgacaagtgaacatatgttctgtataatacaattaatgaacatatgtttgctaaggagatgtgtattatgaacgaattgggaaatttttttgttaagttaaactgtaaaagcattgataatattagaagcttaattatagataaacagggtaattacataaaacaacaagaaaaatacataatgtgtgctggaaagtatgataaaaatggttggacgttagtttttagagctaaaagttttaaagaagctgaagcattagcaaatttgaatccatttctaaatagaagaagcataaattaaagtacataaaatctagatgaattttcatactatatatctaaactttcattcattaactagtgaaaaattaaagaatatataaaaaataagctacaaaaattttataatttagtagcttattttatatttcatattttatatcagaaatgacaattgaaagattttctattaaattgactttagaaccaattttattaggataatcgcttttaagtatttttatagttggtcttaatggaaagttaggcatagtctcttcaactactcctacatcaccattgctaaggcttacaattgttccctgagggaatgggataacaattttacagaatacgttaagcatatcatgatcaaagagtgttccggcatttgacattaagtattcgagtgcatcactaggacacatagctcttttataaggcctgtcagaagttaatgcatcataaacatctgcaatacttacaattctagcgagatagctaattttattaccagatatactattagggtaacctagtccatcaaatctctcatgatgttgcagaactataagcttaatatgagagcttaagctaaaaaagttattcaaaaatttatatccatatagagaatgattttttattacttcaaattcttcaggtgttaatttacctggcttttgaagaatttcacttggaataaatgattttcctatatcatgaattagcgcaccaatgcagagataagttagattgcgcttagataaatttaagctgattccaagtataagtgatattacagcaacatttacacaatgagcataagtataattatccatgctctttatatcaactaaagaaatcagtatatttttatttgataaaacattatctaataactcttctgctatattagtaattgaattgaaatattgttgttcctgctttgtatactcactaatacttctcttttcaaatttatgaacagaagctattctttctatatcagagaatgtttctttaattacagatatagatttttgccttaactctggctttataacatcttcaatttcagcagaactatagtcatcaattatatataaagagaatattttatattccttaattttttgtaacatagtatcgtttaacagaataccagctctaagtagacatctaccatcaggggtatatatgtctttgcctagcaatgaattttctcttacacattcaattggaattaatcgcatgattatacctcaccaaattaataataatcattatatcataaataacatgtaaatttatacaatgataatgcaaaaatattaaaataatatctaaaattctcatatatataaaaaaatttttatataaaaagatgtttattttgaatgatatagttttttttgataaaattatatttaattatgtaataaaaatgttatgtaagttaatattttataattcatttaattatccacatgagtagatgaaaaccataaattatagacattggataaataaagtaataaaatatttgtagataaaatatattaaagaataataaatcggatttatgttcaattttttatattgtaattttaaatattagttaatacttaagattcaaccaaaattatttttagatgtgaaatgtggtttcatatatctgattagttatttgcgcagacctaaatatttgaaaaaatggagtgaggatgttttgaatataaaaactgaccccataggattttttgattcaggggtaggaggtttaagcgtgatgagagaagcaatatctatcatgcctaatgaaaactttatatatttcggagattcaaagaatgcaccctatggaattaagaaagtaattgaggtaagagatcttacaattgatgctgtggagtttttactaagtaaaaatgttaaagcagttgtgatagcctgcaacactgcaactagtgcagcaatagaagagattagaagtaaatataaacagatatctataataggaatagagccagcattaaagccagctgttaagttaaatagaaaaggtcaaataataataatggcaacgcctatgacattgagggaaaagaaatttaaattattaatggataaatataaaaatgaggctgatataatatcattaccatgtgcagggctagtagaatttatagaacagggaatagtagagggcgaagatctagagtattacttaaaggaaaagttcaaaggttacttagataatgatataagctccatagttcttggatgtactcattatccatttataaaaaaggctttatcaaacgttattggaaaggaaatacctcttattgatggtggatttggtactgctcaagaattgaagaggaagttaattgaaagtggtttactaaatgattctaaagaaaaggggaatatagaaatttgtaattcaataaatgatgataaagtgatagatttttgttatagtttaattaattttaaaatataaatatgattcagatttattgaaatatataatataaggatgaatttaaatttatattttagataataatactaattaagattgatatcgagaggagaatatttaaagatgaagaatccaattattacaatgactatggaaaatggtggagttataaaagcagaattatatcctgaggcagcaccaaatacagtgagaaattttgtagacttaatcaatagaggattttatgatggtctaatatttcatagagttattccaaatttcatgattcaagggggatgcccagaaggaacaggtgttggtggcccaggatattcaataaagggagagtttacaggcaatggttttaagaatactttaaaacatacaagaggagtattatcaatggctagagctatgcatccagattcagcaggaagccaatttttcattatggtagctgatgctccacatttagatggccagtatgcatcatttggtaaggttattgaaggaatggaagtagccgataagattgttgcacaaaaaactgatatgtcagataggccttatgaagatcaagtaataaaaagtgttacagtagatatgcaaggggaagaaataaaagagcctaaaataattgaagagtaaaaaataccattctacaagactatagtaagtaaaaagaagagaggtgtcatggatggctacaaataataaatgtatattagcgtatggattaaaagaggatgaaattaagaaaattgagagtcaaaatattaaagttatagaaattaataagaatatgactttaatgacattagaagatataattaatggaaacaaaaatgaagattcttacgatgaaatgcagttgagtgaaaaggcactaattttcaatggatttaaggatgaacaattgaaagttactattagatatattagaagctttattcaaggtggagtacttgctgtatctacagcacagaattacaagtggacttttaaatatctattagagcacttaattgaagaaagagaatggtataaagaacaacaaaaggggagaaagtaaagtgagtcgtgtaggagaaaatataaaacaagctagagaaaagagcggacttacggttaaagctttagctaaaaaactaggtgtagcagaaaaatatttaaatgaagttgaaatgggaagaaaagttgcacctgaatcactaatagataaagcgggcaaggtattaaaagctgatttaaatgacataagcatggttgttaccgatgaagtattgatggaagaaagaaaaactttaaaggaaattcctaaaagaaatgtagaaagttcagaagtttggactgatgctttctcatcagtacttagaagtgttccaatatatgattattcactatctaataaaaagggttctaaagagatgcctattcattcaaataaaatcgagaattatcctcaagataaagtattttatttagaaattgaagatgatgaaatgaatggatttagaatgctaaagggtgatgttgcatttgcacatgctgtgaaggatataagtaatagcggatttttcttaatagattataagggaaaaaggaaagtaagacaaataaaggtattaggtaattctaaattacttttagtaagcaatgctggaagtcttcttactgaaaccatggaattaaaagaagtagatgtaattgctaaattagaaagactagagattacattataagcaactaatgtaagaactcttatattgaaaaattaaagcgtaggtagaaacagagaataattgaatttttcagttattctctgtttttgttacattaaaacatttaattgcatagtatatctatgaatatatttaattaaggtgtggtaattatgcctgaattggagacacaaatatcttcaaaggtagatgcatcaataggattattagctaatgttccaaaagctatattagatgaactaggttataagtatcagagtcagggtaacaatgtggagctcactattttatatagagatactcaagaacaaacaaaatcatttgttgaaggattaggaggaacttttcaggatttaggatttaactttgctgttgttaatatacccagagataaattagaacagctatcaatgagtaattctattcaatatatagaattaccaaagaacttatatgagcaagaccaagaaagtaatagggcatcctgtatacttcaattggctccagattttgatgtttcaggtgaagggatattagtcggatttgtagattcagggatagattatactcaccctgcttttatggattcgaccggaacatccactagaatagaatacatttatgatttaagtacagggggaaatgtatataataagcaaatgataaatgaagcaataaaatccaataatcccttctcagtagttccatcaatagacaatagtggacatggaactcacgttgcaggaatcgcatgtggtgggggaagaataaatcctatgtatagaggtgtagctcctaattcctctatagcaatggttaaagctgctaggggaactgcaatcttaagctctcagattatgcagggaatcaaatttcttatagataaaggtaaagaactgaatatgccgctagttattagtattagtcttagcactaatgatggagcacacgatggaagcagcttattagagcaatacattaggacgatatctaacttggaaagagtatctattgttattgcggcaggaaatgaaggtgatgcaggtcatcatgttggcggacaattagttaaaacacaaaggcaaatttttaatatagcaagcgaagaaaaatcaatagtaatgaatttttataagacaatattacctaatatatcagttaatataataaatccaacaagccaaggaactggaaatattaatatacaagaaggttacattcaaggaacaatagggagtgatagatacgatatatatgtatctggacctaaaccttttgaattgaatagtgaaatcagaataattctttctgctagatctggctttcttgttgaaggtgtatggacattagaaataaatgttacgaatgaatacttaggagcatattcaatatggcttccagttttagaaggattaaatcctgcaactaaatttttagaacctaatcaatataatacgctgggcataccagcaacagtagataatataatagctgtaggaagttataattatagaaccaataatttatcatcattcagtggaagaggtgcacaagatcagaatatagtaagacctgatttagtagctccaggagaggatattgcagggccagtaccaaatggtggatacgataataaaacaggtacatcaatggctactcctcaagtatctggaatatgtgcgttaatgatgcaatggggaatagttaaaggaaatgatccatatttgtttggtcaaaggttaaaatattatttattaagaggagcgagaagaagacgtacagatgtaacatatccaaatccctcatggggatatggtgaagtatgtatattcaacagtttaagagcgttacaaaatgatttaaatgctattttgactagaggaaatataaattcaagagatatacaggtaacaaatagcgtacctaataaatataatattttgagaaaaaatataaagagggaagttatggagaatacgagtagtggaaatacctcaacaaatatcggtaggttaaagattcaatgtttcaggggggaggattatattccaattgatggagccagaataactgtaagaacaccacaaggcgctgaaagtgttaatagtattcagctagttacagattcagttggattgacacaaataattgaattgacagcgccacctttagaatattctttgaatcctaatagcaaccaagtgccttatagtttatatgatataacggttgaaagagatggatttaacccaatagtaataagaggatgtcaagtatttcctacacaggttgcctatcagatttgtaatttgacaagtaactcaggaaggggaatgatgagacaagaggttataaatatacaaccaaataccttgaatggaaatttcccacctaaaataccagaggatccagaaaagcagttacccccaccaagttctggagttgtattgcctcaaccaatagttccagaatatattattgtacaccaaggtgggcccaatgatccatcagcaccaaattataaagtaccttttaaagactatattaaaaatgttgcttccagcgaaatatattcaacttggaatgaatctgctataagagcaaatgtattctgcattgtatcatttacgctaaatagaatttatactgaatggtacagaggaaaaggaaagaattttgatattaccagttcaacagcttatgatcacgcatttaattatggaagaaatatttacgatagtataagtgctattgtagatgaaatattttctacttatataaagagagttggagctaaacaaccacttttgacacaatattgtgatggaaagagtgttacctgccctcagtggttaagccaatggggaagtcagcaattagctcaacaaggaatggttccatatgatattttgaaaaattattatggaaatgatatagaactaactacagctgaaaaagtttctggaagcccacagtcataccctggtgaaccgcttactataggatcttcaggtccagcagtaagaactatccagaatcaattgaatagaatagctagaaattatcctttgatacctaaggttgctgaggatggacagtttaatcaaaagacagcagatgcagttaaaacatttcaacaaatatttacattaccacaaaccggaattgttgattatgcaacatggtatagaatatcggacatctatgttggcgtatcaaggatagctgaacttagagattcttcaatgttaagaagctcgcttggaatgaatgaatttatacctccgattataccaggtttagataataaaagaggaattcctaaattttattattagaattatattaagatggtttttagaggtagaagcagttcccattttctctgtcagctatattatatagctacgattagaataggagctgctataattaatgaaattattagaagatatatgtatgataaaaatttatttttctattccttctagattaaattcaggaatgaaatcagatatgttagcaccttcatcttgtataaacccattaactacgccgatatctaaagcataattgattaggctatcgtagtgttttggattaagtttcttatttatttctggataatcgcaagcattgaacataggaatatattgattcattaagcttatataaatatcatttttatatctattatatagaatatctattatcttttttgaatcaaaaaggagtccaggaagcattaggtgtcttacaataactccatttagtatatttccttttgaatcaaatttaggagtgccaacttgtcttagcatttcatctattattttaatggtattggaagcataatcattaactctagaatattttagagaatatttattatcaaaatatttgaagtctggcaaataaacatcgatgtacccatccaataattttatagtttcaatggaatcataactatttgtattataaagaattgggatagttaaattattttttttagctatttttaatgcttcaattatttgaggaacataatgggtaggagtcactaagttaatgttgtttgcaccttttttctgaagttctagaaaaatttcggaaagtctttcgatagatatttctgcaccaacaactgatgtgtttttaatactatttttattaaaatcagaagaagataaattaacactaatcccctgacttatattatagttttggcaaaatacgcattttaaattacagtgagaaaaaaatacagtaccagaaccatttccttgtgaaataggtggctcttcccaaagatgaagggaagccttagccacttttatgttattgctagctttgcaatatcctatttcaccattatttctatttactttacaatctctattacataaagtacattcatttaataaatctagataattcatttatatcaaatcctttaagaataattattaatatattttataaaaagtatatcataattatttgatttgagtcgtgttagaaaaatcttttttatgcttaaaaaagaatagtatacattggaatataaaaatcaaacttaatagcccaaatataggatatagtttagttataagagttccaaatccaaattgggaaattaaaagagcaagacttattacgataaagattgcttttttaaattttatattaaatgtttgctctagggttttgcttatggaatatatgtcagaaacttcagtagaaaacatctccaaccagattatcacgagtaacaatgcttgaattaagttaccaaatctattagcgacaaaaagtaaaggaatctcatatttatatatataaggttgattaattgttaataataaatttatcattaaacaaagtatagttagtccaattgcgccggttactattccagcaatcattattttacttttcttcatttgagtgctaagtggtactaggactcctgaggctgaaagtgtattatatccggcataaagtactgtggaaataaagattccagttttttgttttggaaagctagcgatattatctaacgaaactgtatttctacaaaatgcaaaatataaaactgtaatcagagtaagagtacaaattaaacctggaacaataaaggaattaacttcaattaatccttcagtatctctaagtagaaaaaatatggctattgcaatcattattagtgagccaattatcttgggtattccaaaaaactgatgtatcaaagcaccacttccagcaagtattatagatgcgctggaaataagaaagagagttgttataaaaccagtgatcttaccaaatatattagggcttattatattcataacatcactataagagctaagattataattaatacttattctagaaattatagaacttattaagatatagaaaataccacaacctataattcctatgaaactagatataccgtattgagtaaaaaattctgtgatttcttttccagaagcaagaccagcaccaactattgttccgataaacacagtggcaacttgaaatacttttaccatttcctttttcaatatttatcccccttaaagaatgttccttttattaaatatataaggtttacttttaatttattctttaaatgttacaatatttaaagaaggtatattagacacataaagaggaggaaatatgaacagtttttgggatggaaaaagatatcatagtttaaactattttttaaggaataaatttggtgaaaaagtatttaaaatatctttggatggaggattttcttgtccgaatagagatggaaagataagtaatgggggctgtcttttttgtagtgaaagaggttcaggagattatgccggtgacagagaattgtctatttcaaagcaatttcatgacataaaggatatgatgtcacaaaagtggaaaagtggtaagtatatagcttattttcaggcttacacaaacacttatgcacctattgatgagttgaagagaaaatatgaagaggcattaaatcaggagggagttgtagccattgcaatagctacaagacctgattgtttagatgatgatgtattagaattattggataacataaacaataagatttatctttggatagaacttggacttcaaaccagcaatgatgataccgctaaaagaattaatagaggatataaattagatgtatttgaaaatgcaatgagaaaattagaagagagaaatattgatgtagtagttcatgatattttaggattaccgggtgaaactaaagaggatatgttagaaacaataaattatatagctcattcaggggctaaaggaatcaaactgcatctactacatttaatgaagcaaacacctatggtaaagttatacgaggcaggagatcttaagttcctatcgcaagatgattatatagatcttgtgactcatggaataacactacttccaaaggatatggtagttcacaggttaacaggcgatgcaccaagagatctcttgatcggaccaatgtggagtttaaaaaaatgggaagttttaaattcaatagataagacgttagaagataacaacttatggcaaggaaaaaatttcagggagtaactatatattaattctaatgattggaaatggagtaggtaaaatgaaaatagatattataatctcagcagatgatatagttgaaagcagagtaaggaataagattgcagttataattgatatatttagagctacatctgtaattataacagcactagataatggggcaagagaagttattccttatttgactattgaggaaacactggaatatgcaaagaaacttagtagagataattatattttaggaggagagagaaaagctgttaaaattgaaggttttgatctatcaaattcgccattagaatatataaaagaaaaagttgaagataaaacagtacttatgactacaacaaatggaacaagagctttaacaaagtcaatggaggcgaaaagagtttttataggggctatgataaatggagaatcagtggcgaaaaaattgattaatataaatgatgatgtggttattattaatgcaggaacaaatggaaacttctcgatggatgattttatttgtagtggatatataattaaccgaattctagatgttaatagaaatatagagttaacagatatagcaaagacagcctgtatgatatataaagaaaatataaatatcttaagctatgtacgagaagcatctcactattcagtaatgaaatccttaggattaaataatgatattgattattgcataaaaaaaagcatcatagatatagttccagaatataaggatggaaaaataacttgtgaatgaaaaactgtttaagattataattaaaagtaaaacacatacatgatttatttaatctgtatgtgttttgcttttttaatttactatgagtaaaagtttaatgattatatgttttctcttgattgcttcagtaaatcatttattcgcggagaacaatttctacctccgcatgaaccgctacctgctccagtagccttttgaacttcttttatagttgaagcgccatttttaatagcttccttaatttttgatctaggtattgccttacaagtacaagtttttgttaatttatctaaaattgcttcattcaaattattttccataatagtatctcctaaaaacatttttaaagttaattgaaaaactaactttatcttaattatacattttataatctaaaataaaagtatagttaattaatattataacaataattataaaaaaatatcctatattaaataataatttttattattatattaatatcgtcttaaataaattaagcgagtgttaagaaaactagtatataattaggcagagtttaaaaaattaattataggaactttattttaaatatttggtttggagtgagaataatgataaaagtgttacttgtggaggataatatagaaataagtcaaaatatagttgaatattttagagatgagttagaaatcaaagcggtgtataatggatcagatgcaatggaatgtttaagcatttataactatgatattgttatattagatcttatgttgccagaagtaagcggaatgagtgttttgagccatatatctaaaaattgtttaaatacaggtgtgattatactaacagcaaaagaagaacttggtgataagcttaaagcttttaatttaggagcaaatgattatctaactaaaccattttttatggaggagttgaaagcacggattaattcgattttgaagagcatgggtaaagttaaaagggctaatcttcttgagttcaaagatatgaaaattgatatgaaagtgaaaaaagtatatataggtacaaatgaattggagttaaatgaaaagctatataagttattggagtatatggttataaataaaggtgtattgctatttaaggaacaaatatttgataatgtatgcggatataatagtgatgcagcaacagaaataattgaggtttatataagcagattaagaaagcaattgggaacttttggatatggaaagtatcttataactaaaagaggaatgggatatttgttggatgaaagtatagaggattaatgcatgaagaaagatatatttttatctacaaagaagaaaatcatagcaacgagtacaattatagtttttgggtgtttaatagtatttgcaataataacgcaggtattatattcgtctagagtactagatgttatagatcatcagcttttagagcagaaagagattttaactaaggaacaatttaatccaaattactatgaatatatttttaatgaagataggcataatttagatggagatttacataaagatgaatttaaaaatccagatggaggagaaaatccacatagaccagagaattttgatggaaaattagattcaaagcctaagcgtatacctccaaatcttattgttattgtgtataaaaataatgagtttgaaacaatgagtagaaatttatatttcagtaaagataatctgccaacaatttcaaatgatgcggaaaacgaagtggttacgataataaataatggctataactttagagaaattgctattagtagtggggagtataagatacaagttattgcgaatattgattcagaagtaaattctataaatagattgagatattcgatagcagtaagtcttataatactaattataattgcaataattctttcagcttatctttcaacaaaagtaataaggccagttagggaagcttatgaaaagcaagtttattttgttcaagatgcctctcatgaaatgagaacaccgttagctgtaataaagggtaagttagaactattagcccactcttggggagatactatagataatcattttgagcatatttcaaagatgatgagtgaagtaagggggctagagaaattgaatagcgatttgttattattatctaaagaagatctagacttgtctataaatataacaaaatttaaattagatgatttaattaatgatataagcgaattttattttgatttagcagaaattaaggagaaaatatttaaagttgctaagccagaagaagaaatatcagttcagtgggattatgataagataaagagagcaattataatattgatcgaaaatgcatttaaatatacaggtgaagatggtaaaataaatcttgttattgaggatgtaaataagcatattaggataatggttgtagataatggaataggaattaagaaggacgaagaaaaacgaatatttgatagattttatcgaagcgatatagttagaggacaaaatattaatggaacgggaataggccttagtttattaaaatctatctcaaagaattttggtattaagttaaaagtgaattcagaatatggcgttggatctgaatttatattattaattcctaaaataattaaataagataatactaggaaaggttattttatttgctaaagggtctacatagctattttattcaaaaatgtaaagctatctaaatcattaagaatactagatttagatagctatgttttatattagtattattataactgtagtaagaaatcagtacagttatatatgaataaaattataaaaccaatgtccagattgaagacctaaaactattgccaatctaaataaacatatagttgatatgcctgctaagattccggtgattaatctccttgtattagtacttttaaagtacatgagatattgaccaaatccatcaattaaaagtggtagcatcagtaataattctataattatatgaatatttttagataatattacgtatgtgagtccgaggatatatcccagtaatattcccgtgcatcttgcacataatggaaattgatgacctctaaaaaagaatgatctctcaggtaattgatggcagaaaaacatatagtttaagacttttttacaattaagcatttaacttagtatgatgataagctgcctagcattccgagtacaaaagctagaacgtaaaaaattatccagataattattccaccaatcatccatttacatactaggctggcactttgaggcttttcatctttccataagaagtacaatattattcctactactggaaagcaacaagacgcaattccggctaaatgagatggattgtctaaattacttttagaagacatattattgccagtagcaacaccacaatgtatacatacggcagcgttatcatctatttgttgtccgcaattcttacaaaacatatatttccccctttaagaagatactatttatagtattgttaataatacaacttatgagtaaatatgtagttatattcatgataatatttaattttatatcttagttaagctgtaaaattgttaagatgatatcacgctaaccttataaaattaggattaaattattttatgacataaattagtaataaagatacaattagtgtttgatcatgaattgacatttaaaaatcattaatatataattattacaataaaagacgatgattaggaaaagtatcttagatattatttttagagagtagttggttggtgtaaagctataataaatcttagagaaaatcacctaggagttggaggctgaaaggcgtaatgccgaataagttatcacgtaagagcctgcgttaaaggatagagtatgtatgtacttgaaataaaacatttaattttgcgtttagatgttttagccttaggtggtttgcgaattcaacttcgtcctttaggatggagtttttttatgtttaaaaaagtatgcaaaaaggaaacaattcttaaagagaataatatagtttacttagctgaaaggggaatttttaatgtacaataaggtagattcatcaaaaggtaccgtcaaaattgaaaaagacatagcaaagctttggacagagaaagacataataaagaagagctttgactcaaattcagatggagaatattttactttttatgacggtccaccaacagcaaatggaaagccacatgttgggcatattttgacaagagttatgaaggatataattccaagatataaagtaatgaaagggtataaggttcttaggaaagctggatgggatactcatggacttccggtagagttagaaatagaaaagaaacttggaatctcaggaaaagaacaaatagaagactttggtgtagaaaagtttgttcatgaatgtaaagatagcgtattctcatatgttagcttatggaaggaaatgtctgaacaaattggattctgggttgatatggatgatccatatgtaacataccatgataattatattgagtctgaatggtgggctttaaagcaaatgtggaataagggcttattgtataagggccacaaagtaatgccttactgcccaaggtgtggaacagcgctttcatctcatgaagttgctcaaggatataaggacgttaaagatttaactgcaactgtaaagtttaaagttaaaggtgaagaaaataaatatatattagcatggacaacaactccatggacattaccatctaacttagcattatgtataaataaatcttatacatatgcagaagtaaaggtaggagaagaaatttatattttagctaaagatttagtaggtaaggtgttaggagatactgaatacgaaatagttaaagagtttaaaggtgaagaattgctaggtactgaatacgaacaattattaccttttgcaaaagttgaaggaaaagctttcgtagtaattcatggagattatgtaacattatcagacggtacaggaatagtacacattgcaccagcttatggtgaagatgatagtcttgtttcaaagaaaaatggaattgcatttataaatttagtagatacaaatggtaattttgttgaagaagttactccatgggcaggaaagtttgttaagaagtgtgatgaaagtattgttaaatatttagaagaacgtaatcaattatttacagcacaaaagcacactcactcatatccacattgctggagatgtgatacaccgcttctatactatccaaaagatagttggtttgttgcgatgactaaaatgagagataaattacttgaaaataataataaaataaattggtatcctgataacactagaacaggaagaatgggtaagttccttgaaaatgttattgactggggtatttcaagagacagatattggggaacaccacttccaatatggcaatgtgaatgtgatcatcaagagtgtattggtagcagagaagaactagaagaaaaagcaactacagactgtaaggggattgaattacataaaccttacgtagatggaataaagttaaaatgtccacattgcggtaaggaaatgaagagaacacatgaagttatagactgctggtttgactcaggatcaatgccttttgcacaatggcactatccatttgaaaacaaggaaacttttgaaaagaacttcccagcacaatttatttcagaagcagttgaccaaacaagaggttggttctatacattacttgcaatttcaacatgtttatttgacacaaattcatttgaaaattgtatagtattaggtcacgttttagataaaaagggacttaagatgtctaagcataaaggaaatgttgtagatccttttgaagtattaaatagtcaaggggcagatgctacaagatggcatttctatactgcaagtgcaccatggcttccaacaagattctctattgatgatgttgcagaagctcaaagaaagttcttaggaacattatggaatgtttattctttctatgttttatatgctgaaatagataaatttgattcaactaagtactctgattttgtttcagataatataatggataaatggattatatctaaattaaacacattaatcgaaacagttgatgatggattaaatacttataaaataactcaagcagcattagctattgaagattttactgatgaattatcaaactggtatgtaagaagaaacagatcaagatattggtcacaagagttaacaaacgataagataggagcttatgtaactttatataaagttctaacaaatttagttaaggtggcatcaccatttgtaccatttatgactgaagaaatctatcaaaatttagttgtgaatcttgataaaaatgcgccagaaagtattcacctatgcacttggccagaagttgataaatctgcaataaataaagaattagaaaaagagatggatttagcatatacacttgttaagcttggaagaagtgctagaaatgctgcaaatgttaagaatagacagccactttctgaattacttatatcaacaaaatctcttccagattattatggagatattgtaaaagaagaattaaatattaaaaaggttgatcttggagcagacctttcaaaatatgttaactttgaaataaaacctaatctacctgttataggtaagttatatggaaaattaattcctcaaatcagaaaggcaatttctgaaaagaaccaaatggaattagctcaaaagattcaaaatggtggaagtgaaactataattgttaatgatacagaaatagttcttacaaatgagaatcttttagttacaatgcaaggtttagaaggttatgcattcgcaggagaaggtgaacttggagttgttttagatacaactgtaacaccagaacttcaagaggaagggcatgtaagagaagttatttcaaagattcaaaatatgagaaaagataaaggatttgaagttgctgatagaataaatctttatgtatcaaataacgatatgttaattgatgttattaagaaattcgaacaaacaataaagaaagagactttaacttgtgaagttctttataatcaagaatctaattattcagaaacagttataaatagtgaaacattaaacatgaatgttgaagttgtaagataaaaactaaaatgactaggaataaaagattttattaatattcctagtcattttaatatttgtatacatatttaatatggttttcatatatatttcttatataagattgtaaattagttaatatgtttataaatttaagattaaaaactatgatttttgacaaaacttacaataaaataataatttattttaagttatgttgatttataaggcaatatgttagtataatgagattatctagaaaaattcaaaggaggaataataatggctacttctattaaggatgttgcaaaagaagcaggagtatcaattgcaaccgtttctagagttttaaatgatatcgatgtagtaaacgaagatactaagaagaaagttttagatgcaataaaaaagcttggatacagaccaaatatagttgcaagaagtttaaaaactcaaagaacaaagacaataggaattttacttcctgatatatcaaaccagttttacccagaaattgtaagaggtgctgaagatgtttcaaatatatacgattacaatataatactttgtaattcagaccttgatatagaaaaggaaaaagaatacttaagggtacttagagaaaaaatggttgatggtgtaatttatatgagtagttctcttaatgaagaaatattagaactaatcaatgaattagatataaaaactgttttagttgaaactaaggataaagaaggagttctaccaagtgtaacaattgataatgttaaagctagctatgatagtacaaagttattaattgaaaagggaataaaagaaattgcctttataggagctgaaaaagagagcaaaaatgcttggggtgatagatacgttggttatgaaaatgcaatgaaggaatcaggaatagaaatagatcctgaactagttcatctaagctcaatgaaagtaaagagtggatacgagggcatacaaaagttcataaagcaaaataagaaatttagaggtgttgtatgtgcttctgatgatattgcaatgggagcaattaatgcactacgagataataacttagatattccaaaagatgtaagtgtaattggatttaatgataattttgcagcttcaattttctatccaaagatcacaacaatttctcaaccaacttatgatatgggatctgttgctatgagaatgcttataaaacttttaaataagaaagagctagatgagccacattatgttttagagcatcagctagttgaaagagaaagtacagtttaatagaaaaataatcaaattttatacttagttagtataaatattaaatgtatatgtttatagaggactacttcaagatagtttagagctatttgggagtagtcctctattagcgttaaagttataattagttgcgcacgtaactaatttatgctaatatagtttgtatgtaattatttggatatgaaatatgattattgttaatactatattaatatgattaagataggggagaagtaatatgggttgctatcagcatataggtaagtatattggtgaaatacatagatctagctatatgtattttggcaagagatttagtaaatttgggataggggctggtcagtacttatttcttttaaatctttatgaaaatgatggtataacacaagaagaattgacgaaaaaggttagattagataaggcgacaacagctagggcaataaagaaattagaggatgaaggttatgtaaggagaataaaaaaagaaagtgataagcgtgcatatagattggaactaactgagaaagcagaacaaattaaagatgatgtatattctataatgaatgaatgggaatctgagattagaatgtgttttactgatgaggaatctcaagaattaatgaatttgttgaataagttatctaagagttctttaattaataaggaggatattcatgaataagcagaatagattaggagaaatgggtgtaggaaaattgttgcttgagttttcaatccctgcaattataggaatgttagttaatacattatataacataatagatagaatatttattgggcatatagaaggcataggtgaactcgccatggctggtgttggaattacaatgccaataatgtttataattttagcatttggtatgttaatcggaataggtacagctacaaaagtgtcaataaagcttggagagcatgataaggaaggggcagaaaggcttctaggaaatgcgtttacattaataataataattggtgtattgttaacgttgtttggtcatatatttgctaatccgcttttgaaagcatttggagcgagtgaaaatattataggttatggtgaagattttataagggtaattattagcggttgcatatttaatttgatgagtttcggtttgaatcattcaattagaagcgatggaagcccaaaaatagcaatggcgtctatgctaatgagtgctattataaacatcatcttagatccaatatttatattcggtttaggccttggagttaaaggaggagcccttggaactgttgttgcgcagacaataagcagtatatggattttatattatttcacaaagggatctagtgtacttaagataagaaggaaaaatttaaaattggagaaggacgcagttttaagtatttttgctataggggtcagtccatttagcatgcagcttgcacaaagtgcagttcaagtgataactaataattcattgcagtcatatggtggtgatttagccgtaggagcaatgactatagtgaacagcttagctatgatatttctaatgcctatatttggattaaatcagggacttcagcctataatcggttataattttggcgctagaaaatatgatagagttaagcaagcggtaaaatacggggttattatagctacaataatagtggtaataggatttataataattgagggaattccagaaacattagttaagatttttaataatgaatcatcgcttatagaagtaactgctcatggaatgagaatatttttaattatgctgccatttataggagcacaaattataattacgaatttctttcaatcaataggaagagtaaaaatatcgatgtttttaagcttattgagacaggtgataatactaattccatgtcttataataattccaaggttcaaaggattagatggagtatggatcgcaggagcaacatctgatatactatcagttataattacactcatcgtatttgttaagacatcaaaggatttaatgggaaatggaaaggaacaaaaagttattttagaaaattaaaagaataggtatgcctcaatatagttcttaatatattgagacatacctattttatttaaaggattccttcgtttttcaaaatatcttctaatttttgaactctattcgataaacaaataaacttttcttttaattgttcttttgacggttcatcattgcttataactttttccatgtcttctacagtctttagagcttcttctacatcttgttgagctatctttaaatttgaatcgttcataaaaattctccttaaaataatataattatgtttagtaattatatcctatcactactaaaaaataagtgcaaggaatataaatgtaaagaataactatactatgggggagaatatgataaattatatttggttttttctaatattttttggaattctagttggattattgactggaaatggagagcttatttccaaagcaataattaattcgtcaggtaatactgtaacttttataattgaacttacaggaataatgtgcttttggtgtggagttatgaaagttgcagaaaatagcggactcaccgaaaaattatcaaagttattaaagcctattcttaaaagaatttttaaggaggctgcaaaggacgaaaaagctttaggagctattgttatgaatcttactgctaacatgatgggattatcaaatgcagcaactccttttggaataaaggcgatggaagaaatggatagacttaattcagataaagaaacagcctcaaatgatatggcgctttttcttgtcttaaatgctacatgtatacagttagttccatcgacgataatatctataagagcagcatgtaactcggttaatcctggaataataatattgccaacgatagcatcaacggcaacagctgcaatagttggagtaatatgctgcaagatattacagaaatatttttagaaatctcaacactagaatttaattagaaatgcttcaaggaggattatagaattatgtttaattacttaagtaaaagcataataccaataatatttttacttataataacatatggtatgttcaaaggaagaaaggtttatgaatggtttatagagggtgctaaggacggattgatggtaaccttaagaatatttccatatcttttagctatgataattgcagtgcaagtatttagagaggcaaaattaatggatttactaaataatctaattgctccacttgcaaatttaataggattacctaaagatctaataccattactaataataaaaccactgtcaggaagtggtgcaattggtgtgtttacagatataataaaaagtttaggaccagatacaagaacaggtcttatagcgtcagttgtaatgggaagcacagaaactatattttatacaattacagtgtattttggagcaattaaggtaaaaaagataaggcatactttatgggcagcagtatttgctgatgcaacagcaataattatggctatatttatggtaaatatatgtttttaaaataacaagtttaattatttgataaaatttgttagtcagaatatttattagttagaatcattggagtattatattaacataggaatatattttaatagtagaaaagaggctaaattatgaataaagatacttatatagaaaacagaagcaaacttatgaatagtgtagaagataattcagtaatgatattatttgcaggtaaaccagctaaaaagactggagatgaattctatcaatttactccagataagaacttttattatttaacaggaatacaagaagacggacatttggttgtattatctaaatataataatatagtaagtgaaaagttatttttgacagatttagatttggataaagaaatgtggagtggaaaaacattaagagattttgagggaaaagagatatctggaataaatgatgtatcttatatgaaggagtttacttcctacctaaatgtattaataaagggaaaagaaaaagttaatttgtatctagatttggatagagaagagtttgaagaaagtgattctgtatcaaatagatttgcaaaagagattattagtaagtatccacatattaatataaagaattttacaagtataattgcgcctctaagaatggttaagtctgagaatgagataaaagaaatgaggaaagtaatagaaataactattgaaggtgtaaagtctttaatgaaaaatgtgaaggctggaatgaaggaatatgaaatcgaggcttattttgattttgaatgcaaaacaagaggcgttaaagattatgcttttagaacaatagcagcagcagggaaaaatgcaacaatacttcattatgtagataataacagtgagttaaaagatggagatttaattctatttgatcttggagctcaatggaatttatataatgcagatataacaagggcattccctataaatggtaagttcactcaaagacaaaaggaagtttatgaagctgtacttagagttaataaagcagtaattgaaagaataaagcctggagtggattcaagagaattaaatgtatgggctaaagatttaattgcacaagaatgtattggattagggcttataaaagaaaaatcagaagttaacagatattattggcataaaataggtcacagtttaggcctagatactcatgatttaggtatacttggtagagaatttacatttgcagaaggaatggtatttacagtggaaccaggtatatatatagctgaagaaaatataggcataagaattgaagatgatattttagttactaaagatggatgtgaagttttaactaagaacatgattaaggaaattgatgaaatcgaagaattcatgaaataatatattgttgccaaaataagaacctaataagattaagatacatatatgtgtttacttattaggtcttatgacgttcttaaaaaatatatttaaaagagggaataaatatgagagtatcagaaagaatacaaaaattaagagaaataatgaaaaaagagaatatagattattatatagtgccaagtgaagattttcatcaaagtgaatatgtggctgaatgttttaagtctagagcatatataacaggatttactggttcagcaggaacagcattgatcggaatggaaaaagcaatactatggacagatggaagatactttatacaagccaatgaacaattaaaagattctggagtagagctttttaagatgagaattcctggatggccgactttagaagagtggttgatggaaaatatgatggatggccaaactttaggttttgatggaagagtattatcggttaatcaatataaagaaattctaaaaataaaagaaaataaaaatataaacatagtaatgaataaagacttaattgaagaagtatgggaaaataaacctaaaatgcccaaagaaaaagtttttttgcatgaagtaaagtattgcggaaaaaccgcaaatgaaaagattcaagaagtaagaaatgaaatgaaaaagctatgtggaaagtcatatataatatcatcattagatgatatagcatggatttttaatattagaggaaatgatgtaaagtatacaccagtaactttagcatatgcattaattgatgaagagaaagctgtgctatacatagatagagaaaagatatcatctgctgatgaaaaaacattaactaaagaaggcataataataaaaaattatgaggatatatttgaagatataaaagaagtacaagatagtgttatattagacccaagtaaaataagtgcgtatatatacaatcagattaataaaagaataaagaagatagaagaaataaatataactacaaaattaaaggccataaagaataagaaggaaatagaaaatcttaaaaattgtcaacttaaagatggagttgcaatggtaaggtttattaagtggatcaaagaaggtctagataaggaagatataacagagatcaccttagcggaaaagttatgtgattttaggagtcaaggagatttatttattgaggaaagctttggaacaattgcaggatataaagaacatgcagcgatgatgcattattctgcaacagaagaaagtgcatataagttagaaaaagaaggaatattgttagtcgatagcggtggacaatattttgatgggactacagatataacacgtagcattgttttgggaaaattaactgaagaagaaaaacgagattttacgctggttctaaaagcacatatcaaccttatgaaagcaaaatttttaaaaggaactacagggtccaatatagatattttaagtagaagagttttatgggaagaaggaatagattacaaatgtggaacaggtcatggggttggattctgcttaagcgttcacgaaggtccacaaacaataaggccagtaccgaatacaatagaattagaaccgggaatgatattaactaatgagccaggaatatatagagaaggcaaacatggaataaggacagaaaatattatgctagttgttgaggacgaaagaaatgctgagtttggagaattttataaatttgaaaccatgtcatattgtccaatagacttaggtggaatcaatgttgaattgctgacagaggatgaaaaagaatggctaaataattatcataaagagacttatgataaattaagtccattcttaagtgatagtgaaaaacaatttcttaaggaatcaactaaggaaatataatttaaacattataaataggttattgcacttgtaagcaacaaatagtataatgtaaataatttggggattaatatatattataggttaaaaattttatctataaagtttgcataaaataatctcttaaataaactagtattaattaaatagaatgctatgaagagaagagtaataaaagaatcattctataagagagctaatatatgctgaaagttagcgtttgtgaattttatgaagatggtctcagagcatgtttcctgagtcaaaattatttggttagggaaatacggaagcgaccgttatattgcagggtgatgttggtcacctactgagttatttgctgtgaggtaaataagaattagagtggtaacacgtataatacgtctctatataggttttaatacttatatagagatttttttgtgcttatgaaaagattaaaagatagagccaagataatttgaagacaaaaacatgaagatgataataatcttaacaatatatattctttagaatatatattctaatattctaatattctaatattctgaagaatatgcttgaaaaatgcgggctggatatgttatgacacaatatatagaaggtaaaaattaatattataatagaaaaatagcaataaataattgctttaatataaggaggacacaaataatgtgtgcagattgtaaaaaaacatattatattacgacaccaatttattatccatcaacaaagcttcatataggtaatacctatacaactgtagctgctgatgctttagcaagatttaagagattaacaggctatgatgtaatgttcttaacaggaacagatgaacatggtcaaaagatccaaagaatagctgaagaaaagggaatcacaccaaaacaacatgtagatgaagttgttgctggtattaaagatctttggagcatgatgaatataagttatgataagttcattagaactactgatgattatcatattaaagctgttcaagatatatttaagaaattatatgatcaaggagatatatataagagttcttatgaaggttggtattgcacaccttgtgaatctttctggactgatacacaattagtaaatggaaattgccctgattgcggaagaccagttgaaaaatcaaaggaggaagcatatttcttcaagatgagcaagtatgctgataagttaatcaaatatattgaagaccatccagagttcattcaaccagaatcaagaaaaaatgaaatgctaaataatttcttaagaccaggtcttcaagatctttgtgtttcaagaacaagctttaactggggagtacctgtaacttttgatgaaagtcatgttgtatatgtttggattgatgcattatcaaactatattactgcccttggatatggtcaagaaaataaagatttatataataaatactggccagcagatgtacatctaataggaaaagatattttaagattccatactatttattggccaataatgttaatggcgctagatctacctcttccaaagcaagttttcggtcatggatggctacttgttgatggtgggaaaatgtcaaaatctaaaggtaatgtagtagatccagttgttcttgtaaatgaatttggagttgatcctgtaagatattatttattaaaagaaattccatttggagcagatggattatttaataatgaaatatttataaagaaaataaattcagacctttgtaatgatttaggtaatcttttatcaagaacagttgcaatggttgaaaaatattttggtggagaaatgccagctcaagatgaaaaagaagctattgatgatgaattaataaatttagcattatcagcaccagctaaaattgaggaggcaataaacgaattaaatatacctcaagctttagaatatgtttttgaattaataagaagagcaaacaaatatatagatgaaacaactccatggatattagctaaagatgaaagtaaaaaggctagacttggaacagttctttataatttagccgaaagcttaagatttgcatcagtaatgatttcagcattcttgccagaaacatctaagaagattaatgagcaaattaatactacagaaatttcatgggaatcattaaagtcatttgatggaattaaggcaggaactaaggtagtaaaggctgacaacttattcccaagaatagatgtagataagaaattagaagaattagaagctttaaaggctgctcaaacaccagctaagagagaaattacacctataaaagaagaaataacaatagatgattttgaaaaggttgatttaagagtagtaaaagtattagcatgtgaaccaataaagggagctaagaaactattaaaattaaaagttgatttaggtggagaagaaagacaagtggtttctggaatatctaagttctataaaccagaagaaatagtaggtaaaaatgtagttttagttgctaacttaaagccagtaaaacttagaggcgaattatcacaaggaatgattttatgtgctgcaacagatgatgacagtatattaaaagcagtggatccaggtgagattccaacaggtagcattgtaagataattataaaaaatagaacgtctcacttaggggagtgagacgttcattaaccatactaaataaatggttaaaaggggtaaataataatgctttaactactttacaatattaattttaatgcattaatatgtcatttaagtgtcaaataataaattcgtaaaaaaattagtatttacgaatttatttttattttaattgctacgatttgcatttgatcatatagttttaagtaaagctatcataaagaggtataagtaataattttatgttattatttaaataagtaatcctaaatttaaatgcagtagtttcagaatatgacaatttggaaataatgttaataggaaaggaatattggtttatgaatcaaaaatttaaaataatagatagtcatgctcattatgatgatgaagcttttaatgaagatagggagcccttgctaaatgagattaatcaaaatggagttattggaatcctaaattgcgcatcatcatatgatagtttaaaaacaacagataaactaactaaagatcataattttatctttggagctttaggaatacatccggaaaatgcgaatgagatgaaaggcgatacactagatgaaattaaatcttatattaagaataatgacaaaatagtagctattggggagattggattagactattattgggatgaaaatccacctaaagatattcaaaaggatgtatttagaagtcatatgaatttagctaaagaactaaattatccagttgttattcatgatagagatgcacataaagacacattagaaataattaaggaattcccagaagttacaggtgtagttcactgtttttcagggagtgtagaatttgcaagggaatgcgtaaaactaggatattatataggaataacaggtgttgttacatttaaaaatgcaaaaaaagttgttgaagtagttagagaaatccctttagaaaaaatacttgtagaaactgattgcccgtatatggcacctgaaccaaacagaggaaagagaaataaatcagactatattgaatatataataactaagatagcagaaattaagaatattgacccttatgaggcaaatttgagatttaacgagaatttttttagattgataagaaaggaaaaataaggtaaaatattaaatgtacactttaaatataatttctgtattcaacataaagtaaatctaatattaaactgaaattatcattaagtttaataaatgtttctataatttcatatcattaaatttttaatttcataatgaagtaatattaaataccgctatcatttttatatattatattttatgcacaaagtgcattattacaatgcttcattatattgcaagagtttactaatttgacaagtctagaatattaatatataattcaaaagacactcttgccaaaggagggaaaataatgatagaaaaattgagacaatttattaggcaaagtttttctaacggtccgaaggcaaaaattataattggaacaattgcgatagcatttgtagttgttacagcagtgactataatgagcataagaaaaacgctcgtaataagtatagacggtaaagaagcgacttttgtcacttacaaggggactgttaaaggtgtgttgcaagaaaatgggatagaagtatcgcctaaagataaagtgcaaccgtccttggaatccaaagtatctgaaaaagaaactattaaagtaaaaaaggctgttccagtagatattaaggctggtggaatggaagtacaattgcaaacggcagaggatacggttgaggatatgctggatgcagagaaaaatacattaaaagatcaaggaatagaatttgacaaagacgtagatgaagtatcaccatccctagagtctaagttagagggtaacgaaagtgtccaacttgtcaaagtggaaacaaaagatgtcaccgaaaaacagccaattaacttcgatacaattgtagaaaaagatgaaaatttggacagtagtgttcagaaggttaagagtgaaggagttaatggtgagaaacaaattacttatcaaataatatataaagatggggtagaaatttctcgtaatgtaaagagtactaaaaccatattggaaccacaaaatgaagttgtggtcaaaggaactggtcaagtgtacgcaagcagaggtggagacagaataacttataagaaaaagattaattgcacagcaacagcttatagtaaccattctactacagctacaggaagaacgcctgttagaaatcaaggtggtatgagtacgattgcagtagatccatccgtaataccactaggaagtaaagtatatgtggaagggtatggatatgcaattgcatcagatacaggtggtgctataaagggcgacagaattgacatataccttaattcgtcaaatgaatgtgattcgtggggaagaagaccagttgatgtattagtagttgcttacccagggcaatggtaagctattttaagagataacagatgttatctctatttttttctttgaatttgtggatgttttatcatattattagaaatgagataaaataaatttaaggctattttatggtatagatatatgaatgcaataaagtaattattaataaagaaaggaagtaacacattgataaaagaagtaatagtcgttgagggtagagatgacgttgacgctgtaaagaaagctatagatgcagaaataatcgctgtaggaggatttggaataaatgcaaaggtcatagcaagaatacaggaggcccagaaaagaaaaggggtaattgtattaacagacccagattttgcaggggaaaaaataagaagaataatagcaaaaagagttaaaggaataaaacatgcatatattgcaaaagaagatggacttaagaacggagatattggagtagaaaatgcatgcccagaagttattttgaaggcgcttgaaatggcaaagataacacaagaagaaaaacaatcattttttactatgcaggatatgttttatttcaagcttacaggagataatacttcaaagattagaagaaatatgcttggtaagttattaggaataggttatggaaatgcggcgcagatggtttctagattaaataattatggaataactaaagaagaatttactaatgctataaaagaaatagaaaaacaattggaagtaggtaagaaataaatggatttaaaagatataaaaactcaggaactagtcaaaaaatataattttaagttctcaaaaagccttgggcaaaatttcttagttgatgattctgttcttgatgatatagttaatggagcagaagttaacaatgaagattttattatagagattggaccaggtgtaggtacgcttaccgctcaacttttgatgaaagctaaaaaagtaacatctattgaattagataatgatttaattccgatacttgagcaagagttgggggagcacaagaattttagtttaatacataaagatgcacttaaagtggattttaatgaacttattggagatgagaaaagtgttaagcttgtagcaaatcttccatactatgttacaacccctataatagttaagcttctaaaaggtggatataattttaaatcattaactataatgattcaaaaggaagttgcagagagaattaatgctgaacctaattgtaaggaatatggtgcattgtcggttttagttcagtattattgtaatacagacataataaggaaggtaccaccaacttgttttattcctagaccaaaggttgaatctatagtaataagactagatagattagatgaaccaagagttaaaactaaggatatcaatattatgtttgagattgtaagagcaggtttcaatatgagaagaaaaactttatggaatgcagcaaaaacattaaaagtagataaagagaaattagaagaagcatttaagaaatcaggaattgatcctaagagaagagctgaaacattaacattagaagaatttgcggccttatcagattgtatatatgatataagaaactaaaaggtggagaatgagtaattattgaattattcgttctctactttttagtttctattaaaattgctgggctatatagagtatgaaaatatagaaaagtattagttaaatcataattctaatttccaaacatatactatatggaataaatatatgtggagggaatatagggttggcacacaacaaattgtatagaaactttataatattacaagaagatgaaagaggatattctcaatctaatgataaagctttgtctggatatgctaaggtggaggctaaaggtgataagtgtaaaatctcattttatgcgcagaatcttaggcaggaagataattattccatggtacttatatgttgtaagaaggatttaaaacaattaattgatattggacctttagcaataaatgaagtcggaaaaggagatactagcaaagaatattatgtaaataacatagctagtcttggaatatcttatgaaaaaatatctggtgctgctatatgtagggtaaaagataatgaaacagaatttgtaatgcatggttttatgaatggagaagaatctgctgataattggagaaagtttaagattataaaagctgattctaggaaatatgttgataaaacaacattacaaactaaggaaaaagaaaatttgactgtaagtacattaaataaaactatcactcaatcaggtacgaaagaggatgaattagtaaaggcacctaaattacaagatgaatcagttgaacgaaaaaaagatgatattgatcttcaacctaaagcgaacatagaatctaaagttgaagataaacaaaataggattccagaagatcatcaaaacataactgaaactatagataatttagatgaggaaagaaacaagaataaagagagcaaaaaatgtgagaaagattataaacatgacaagtgcgataagcatgataaagaagataaatatgataagtgtgataaacacgataaatgtgataaagaagacaaatatgataagtgtgataaacacgataaatgcgataaagaagaaaaatacgataagtgtgataaacatgataaatgtgataaagaagataagtgcgataaacatgacaaatatgataaagcggataaatatgataagtacgacaaatatgataaatgggataaagatgaaaaatataataagtgtgataaatatgataaacatgataagtatgactatttcgaaaaagaagaagatatagatgatgttattggtaaaatggctaagaaattagatacttatgatggtgtaatagatctaaaagtaagtcatcacatgtatgaagatgttatagtatatggatttataaaggataagaagaatcataattctaaatggaagaaattcaaattagaaaagaaatgtagaaatgaaaatcaggatatagataatgtgcaagttagctctaggagaatagaagaaaactttaaattggataaattgaatgacgtggatacatcagacagaatggacataatagatttcgatgaatatgaaaataatattcaacaaggaaatttaggtggagccacaggagcaaatgatacatctacgatgaatacgactggtacagtggagtctatggagcaaggcaactcaaatactggaatgggccaggttgatacaggaacaatgtggcaaccatggtcagggaactcggcaaatcagactagcacaggagatatgaaccagacaggcactaatactgtaacagatcaaacatcatcaaatgctggaatgaatcaaatgaacacaggaacaatgggacagccagagactagcggtgaaaccggaggcatgggacagctagacttaaatatgggagatacatcaaatgaaaataataataatcaaaatgcctcaaatcagggattcactataagtggagatataggtaagtattttgagaagttagcacaagattttaaaccgtttattggaaaattgaatgatataaacttctgtaagtggtataaaatcattgtaaatggtatagaagatttatcaaatgattcaaattataacaaatatacattagcatattatccaatgttaaattattatccttacattagtaaaacaggacatttcttattaggatataaatgtaataaagatggagaaatgcaatatattatatatgcaataccaggaagcaaagaaaaaaatgatcaaccgtatggtggaagaacaggtttcgtaacatggactaatgatggtaataatggccaaggatattggttgatgttctatgattttaaaaattcttcaatcgtaattccggcaagatagagaacattgttatgaataagaagcagttgattgttacgtcaatattgttatcattgatgttgatactggtcataacccagggcttctttaaagaaaatttcgaacaggtaattcttatggatcaggggataagcaaatttaaagaatattcttttgacgataataaatatgttatatctctgccaagtgaatggaatgtggaggaaaaagaaagtaaagggcaatatgtgagttatgaattggattttaaagacaaaaataataagcttactggtttattgcaagtagtaaataccaaagaggatataaacgtgtttgcagaaaaagatttaaatagtcaatgtctagaatattataattcagaattaacatcttttaaaaattcctataattctggggtattagttaaatatgaaacaaaagtaaagaatggatatgattttaacaatgaatgctattatctaaatttaggagaaggtaaaacagcaaagatattatttaatcttaagtcaaaggattataaggataatatgaagactattttaaatacgattatttcaagtattaaatcatctcaaagttgaaattagccaatttattttatataaagttttatggattataagtggttaatatgaaaagactacattatatgtttgatataaaatatataattgtgtgaatgttgagttgatgagttaaataagatttgccaaggataagcataagtattataatttaagtatcaaggagaggccagaatagcttctccttgatacttatttgacgtttggaggcgagcaatgaggataatattatttgagatatttgggatacaaataaagggttatggattaatgattgcaattggaataatagttgcagctgctatatttataaataaaggaaagaaaaaaggctatgatgaggattctttattaaatttagtaattttagctgtaataggtggagcgcttggtggaaagggattatttatattaactgagattaaagatattattaaagagccaagcatattactgaactttggatatggatttgttatatatggtgccataggtggaggagccttggctatgtacttatattctaggaaaaagtcttggaacattgttgaaatgttggatatgacggttccaggtcttgcaatagcccaaggttttggtagaattggatgttttctggctggatgttgttatggagcagaaaccaaattaccaataggtgttacatttccaaaaggatctttagcaccagcaggaatacacgtgcatccaacgcaaatttattcatcaatatttgactttttgctaggatttatacttttgtactatagtaagaaagaaaaacaaacaggaaagatagtgggactatatttaatagtatatagtataggtagatttttagtagagtttttaagagatgatccaagagggagtatcgggattctatcaacatcacaatttatcgcaatatttactttggtgattggtattgttgtatttaataaccataggattttcaaaggagcgaagaagaacagtgagaaatagtaagtttttaacaatagttttaccattggtattggtctctagtatgatgctctcaggatgtagcttcattgataatatagaagttaaaatgaatcttaaaaatcaacaatttgattatataaagcaaaataaggtggataaaattattatacaaagtgttagagatagtggatttaggtttgtagttaatgatcctaaagccatagatgacatttacaagattttatcagatggaagtgaagtttcaaagaaaagctcattagatccagattatatttttgaggtgtgtaccggagatgaagtgagaaagtatcagtatgtagttggagctaacgaacatgggacaggaaacttttatgatgacgataaggcattttcagtacctaaaaatttagagaatacaataatgcaaaatctttcattcataagaaagccaagagactttaattatatatattatcaatcaatattaaaagttattgataagaaaaaagatagcttatccaacggaaacaaagttggagtgaacatagctggagatacagattgtttgaaatacatattttctgtggatttagaagattttaagaaaagtttgaacaaaactttacctagtgttgatttagtaaacaataattatgaagattttgatacaataattaaagtaaaaaatagaggatataatagtactgttttcaaaacactaataacagtagataataaaaaggataattcctttgaaagttactatgtaacggcagaatataattataaagactgggatattaaaataagtgagcctaataaggtcccacaagattggtaagtaaaggagcatatataaatgagttgtgaaagttgtaaaagtaaagacacatgtcaatctaaaggaacaggatgtagtgaagaaagtttaaagttaatatccagatatggaaatattaaaaatgttataggtattataagtggaaaaggtggagttggtaaatcaactgtaactggaatgatggcaagtatgttatctaagaagggatataaagtaggagtgttggatgcagatattacaggtccatctatgcctagattttttggggttaacaataaaagagctaaaataattccattagaaaatgatatggtaaaatttgagccagtggaaacagaaagcgggataaaaataatctccatgaatcttttaacagcggtagaagatgaacctgtaatctggagaggacctgtaattacaggggtgttaaagcagatgtttgtagaaactaattgggaagagcttgactatttacttatagatatgccaccaggtacaggagatattgctttaactgtaatgcaggaattccctattgatgaaattgtaatagtttctacaccacaagatatggtgtccatgatagtcaagaaagttgttattatggcccaaaagataggggtgaagattaagggcgtagtagagaacatggcatatataaactgtccagattgtgataaaaagatacgagtatttagcagaaagtcatcagaagaaaatgcggagtatcttggaattcctttaataggagagttaccaattaatattgaacttacagaagcattggagcaaggaaaagcagaggaatacgttaaggagaatccgttatattcactaatatttgaaggattgtattaaaagaaaaattcttttccttatactatatttatttcatcattttaaattatattattaaatatacataacttaatatttcttgggaaataataagcttgtaatttgatattagaggagatgaagtaaaccatgaaaccaaaagtagataaagatacttgtatagcttgcggattatgtccatctatatgtccagagtgctttgacatgcaagatgatggaaaagcaggagctatagttgatgaagttccagaaggttgtgtagatgaggcaaaagaagcagaagaaagctgtccagtaaatgcaattgaaatagaagaataaaatttgattgcaaaatacaactaaaacgtctaaaataaataatttataaataatagttatttattatttgatcaaaaataggattaattttgttttataaaacaaaattaatcctatttttattctatatattttgcattaataagcttaaaatgctgataagtgaaatttttagttactaagtatggcttcgaaactaattgtatatataaattgttttatatatacaattagtttgaaatagtatttactgatgatgcatgaaaaattctttctataggaagaacggctaaaattactaagcatatgattccttctattccaatcattggaccattaacaagtaaagaataaactactggggacatcccttctggggcaaatgacccgaagaaaactataccagaaataagatgacataaaaatctgaccagtattgcaatactcactccaactaatcttctttgtttgaagaatccggcaagacctaatgctgtaaagggcaatggataatcaaataaaacttgaatcggatgtagtatatatggatccagtattagggttattacaccataaagaaatcctgttaaacatccaacttcaggaccgtatatgaatgctatgagcaatactggtatcatgctgcctaaagttatgctaccaccttgaggaaaatgatataatcttagcatttttaatatagtggctaacgctaatgctataccaattctagcaattagttctggcgtgaattttatcttttttgccttagcgaatactataagcagtaaaatacatcctaataaagttataatagacattggacttgcaagaatatcttgaatgttttgcgagaaattttggaaaagtttagaaaattgttcgatccaatcattaaaaattgacataaaaaaaacctccttaattgtgctcggagattatcaaccaaataaatagtttaaagtttttaagaggttgcattccctacgctagaattaactagatcaggttttaagggtttatgaatatcaaatctcagcctctcggctcccctagcacattataaatatattacacttatactattttatacctattattatagatagtcaattagattgtatgtattaaacttgttattattacttaaattggaatgtgaatttgagctagaagcaatcaaatttatagaatgatgtgggattgtgctatttggtaatctatttgatgaaatggtgaagatatcatcatttctattaacaatagtagcatctctatatgttgaatctaatataaaatctttcataataacaaaacagtcctttcagtaaagatttctttgttattattatttacaagtagaaaagtaagtatacctgtaaaaggttaaagagctaaataaaaaaatatgaattttaatatttagctctttaattatgagtaaatagttaacatagatatttttcgattaatctaatctttcaactattaatccaacaagaccaggtccagtatgaacgccaagagcaggtcctattgatccgcctaaaatacattcaattagattaggaaggtcttttatagaatcataaagcattttggatttctcaggtgcatccccatctaaaatccaaactttacacctatgattttctagataatttattaatatatttgttaatttagatatgcattgctttatgcctcttattttacaaactgtatgatatataccatcatctccaacagtaataataggttttaaattaagtacacctgctatagtcccggcaactttaccaactcggcctccctttattaagtattctaatgtatctattgtaaaaaacacgtcaatcttatctctaaaggaaggtaaagtatttactatttcatcaaaggatttcctttgctttattaggtttagagtttcaatgaccatagcgccttctgacatagttaaagtcatagaatcaaatacgaaagtttttacttcagggacattttcagatgcaagtcttgcagagttataagcgccagaaaggccacttgatattgttataataattgcatgtgtatatccttcgttttttacttgctctaaagcagctgtaaaatcctcaacaccaggcaaggaagttttaggtatctccttaggcaaatattcatatagggcctttggcgttatatctattccatcaatatactctctatcagagaatataattttaaacgggactattttaatattattttctattacgaaatttgtattcaaatcagaagcactatcagttattaatgctattttatccatcttagttcctcctagaaatatatagtcttagtttaattataacactatttgtaaaaaatacatttcttatatattacttaaagaaataatttatattatatttttagataataaactatgtttttcataaaactttttggttcgcacaagatgataatttacagtaaattttaatcaatttaactttttagaacacatataataataattttcttatagtttgttatgaaaaaatactataaatcatagtaaattacaacaataaagattatctacaataagtcaaacataaaaaagtagtaaaaattgaataaatcgaaagataataggatataaattgagataattaaaatctagtggtttaaaaataaaaaattagaagtgttgctaatgaatacctaatacagtataatagtacggtagtaaaaatactatatattgtgccatggagggaataataatgctatatgttgtgaaacgcgatgggagagaagttgaatttaattcagataagatagctcaagcaattaaaggatcagctagtgaaatcggtttaaatttaaaagaaagtcaagttctagatactgtacataaggtgattacttatatagaagaagagtataagaagactataactgtagaacaaatacaaaattttgtagagaaagcattaagaaatgagggacacaaagatatagcagtcgcttattcagcatacagacgtgaaagaactaaagtcagagatataaaatcagatttaatgaaggctataagacaaattggagttgaaactgatagagataatgcaaatgtaggaaataatttcagttctaagttattaagaatagcatctgaatcaaataagtggaatacactagctactatgccaaaaaatttggcaaaggctcatgagaatggtgatttatattatcatgacttagatagctataatttaactgtaaactgcttgcatataccaacaaaagagatattagagaatggatttaatactggatatggaacaattaatgctcctaagagaattgaaactgctgctgaattatcatgtatattattgcaatcaactcaaaatgatatgtttggtggtcaatctcatccggattttgataatgacatgggtatatttgtagagccaactagagaagaaattagagaagaattattggaactaggtgtatcagaagaaaagttagaagctatggtagaaaagaaagtaagaaaaaaggtacaacaagcaatgcaaggtgtagtttataatcttaatacaatgcattctagagcaggatctcaagtaccatttagttcaatcaatattggtttacctacaagctcagatgcagcattagtatgtgaagtttttcttttagaatatgaaaaaggattaggtaaaggtgaacaaccaatttttcctaatataatttttagagttaagtcaggcgttaatagggaagagaatgatgaatatttttatttatacaaactagcatgtagagtagctgcaaagagaatgaatccaacttttatgaatattgatgcagattttaataaggaatattacgataaaggttatgttccagctacaatgggatgtagaacttatcttatgaaaaatgtaaatggtgagcctggttgtaagggaagagggaatatagcaccaacaactcttaatcttccaagaatagggttgcaagctaaaaatgatataaataagtttttcagtatattagatgcaagattagaattagcaaaagattcgttaatgcatagatatgagattttaaagaatctaagagttaaggatttaccttttgttgcaggccaagggcttatgaaaggttcagaaggattaaagcctgatgattctatagaaccaatattaaagcaaggaacttggggaataggattcataggtgttgcggaaaccttattagctttaattggaaagcatcatggtgaagatgaagaagcaagaaaattaggaataaggattgttgaacatataagacaatattgtgatagacttacagaggaatataaactaaattggagttgttatgctactccagcagaaggcctttcaggtaaatttataaagcaagatcaaaagatatttggattaataaaaggagtaactgataaggagtattatacaaatagttatcatatacctgtttcgtacccaatatctattaaagataagattgaaattgaagcaccgtatcataaactttgcaatggtggtcatataagttatattgaagtagacgacacaccagatgcagagacaataatggatataataaattatgcatataaaaatactaatattagttatatgggaattaactttcatataagatattgtagagaatgtggtacttatcttcaaaacaatgaaaacaagtgtcctaaatgtggtagtcagaatattcaaggaatatcaagagttacaggatatttaagtttagatgaaagattcggtgctggaaagtatcatgaaagagaagatagaatatcacatactgagagacatgggcatcactactaaaagcataatgatgatagatttttaatttataaattataatatagaaaaagaagatggatttattaatctcatcttctttttttatataaaaatatatcaatatatatttcaaaatatttaattcatcagatgttatattggcttataaggcaatatggaacaaataattttatgaggaatgagttatataatacagaagttatatattaaggaagcaaaaaaacatattttctataagaattattaaaaaatagaggtataaaaagtaaactttaatatattaatgaaattaatagagaatataatgtaactatttggtatgaacactaaatgctttgggtaaatctgctaaggaaaatggactgttaatttatcaatgtattgcaacatcaaaaaaaaaacttgcaataattgagagaattttcattaaaaacaattaaaatgtgaaaatacatgaaggagagtagctgtttcgttgcaaaaaaataaaataaatcttgtatagatttattaatatatgatattataaatatacagtaaaaatgttaatttattaaaaatatgctttaagtaataagaaaataatataaatggggggactaaaatggcacttagtaatttaaaaactaataaaaaagtttctatagtagataccactcttagagatggtgagcaaacagcaggggtggtttttgctaatgaagaaaaaatagtaatagcagaaatgttaagtgacttaggtgttgatcagctagaagtagggattcctacaatgggtggggacgaaaagaaggctataaaagaaattgtaaaaagaaatttaaaacctagtattatggcatggaatagagcagtagtcagtgatatagaacaatcaatagattgtggagttgatgcagttgccatatcaatatcagtatcggatatacacattcagcataaacttaaaacatctagagaatgggtattagaaagcatggttaaatctgtagaatttgcaaagaaaaatggtctttatgtatctgttaatggggaagatgcatctagagcagataaggactttttagttgaatatattaatgcagctaaacaagcaggtgcagatagatttagatattgcgatactgtaggaattatggagccatttaaaattagagatgatattaaatatatatatgataaaacaggctttgatatagaaatgcatactcatgatgactttggaatggcaacagctaatgcggtagcaggtattaagggtggagcatcgcatgttggagtaactgtaaatggtcttggagaaagagcaggtaatgcagcattagaagaagttataatggcattaatgcttgtttacggatataacggtgatggaataaatacacaaatgtttagagaagtatcacaatatgtatcaagagcatcaggaagagaacttccaatctggaaagccattgttggaacaaatatgtttgcacatgaatcaggaattcatgcagatggagcaataaaggatcctaagaattatgaagcatttgatccagatatagttggtcttgaaagacaaattgttataggaaagcattcaggaagagcttcaataataaataaatttagagaatataatagagaacttacagaggatgaagcaaaaggaatacttgaacttgtaagagctacatcagttagattaaagagaactttatttgataaagaagtagttcaattatataaagagtatcatagacgattagaagaaagaaataagcaataatagggggattaaacatgggagataatttagtttataagattttaaaaagccacattgttgaaggtgaattaaaggcaggagagcctatagcattaaagattgatcaaacgttaactcaagattcaacaggaacaatggcatatcttcaattagaagctatgggaatagatagagttaagacaaagaaatcagtagcatttatagatcataatatgttacaacaaggttttgaaaatgcagacgatcataagtttattcaaacagttgcatctaaatatggagtatatttttcaaagccagggaatggaatatgtcatcaaatattcttagaaagattttcaacgccaggagatacattaataggttctgatagccatacaccaacagcaggtggtgttggtatgcttgctatgggagctggtggattagacgttgctcttgctatgggaggaggagcttataatattaatactcctaaggtagttaagattgagcttactggaaaattgaataaaatggtagcggctaaagatgttatattagaagttctaagaatattaactgttaaaggtggagtagggaaagtatttgaatacgctggtgaaggtgttaaaacactttcagttcctgaaagagcaactataactaatatgggagcagaacttggagctacaacttcgattttcccaagtgacgaaagaactttagaattctttaaggcacaaggaagagaagaagactttatagaatttaagccagatgcagatgctgtatatgacgaagtagtaacaattaatttaagtgaattgacaccacttacagctaagcctcatagcccagacaatgtagctaaggttagcgaagttggtaagattaaagttgaccaagtagttataggaagctgtactaactcttcttatgaagacttaatgaaggttgctaagatattaaaaggtaaaaaagtacatccagatgttagcttagtaataggacctggatcaagacaagttatggaaatgatagctagaaacggtgcattagcagatataatcagctcaggggcaagaatacttgagaatggttgtggaccatgtatcggtatgggacaatcacctggaactgatgcaatttcccttagaactgtaaatagaaacttttatggtagaagtggaacattatcagcacaaatatatatagtgagtcctgaaactgcagcagtttcagctataaatggagttttaactgatccaaccgaagtggatgtagatttaacaatagatatgcctaaggaatttttaatagatgattctatgattttagcaccagcaccaacaaatgctgaagttgaagttgttagagggccaaatattaagccattcccagtaagcaaaccattagctgaagaattagatggtaaagtattaataaaggttgaagataatattacaactgaccatattatgccttcgaattctaagttattgccatttagatcaaatataccttaccttgcagaatactgcttcaacacagttgacacagaattccctaagagagctaaggaatttaatggtggatttataatcgctggaggaaattacggacaaggttcaagtagagaacatgcagcacttgcaccattatacttaggagttaaggctgttatagctaaatcatttgcaagaattcataaagctaacttaataaataatggaatagttccaattgaatttaagaatgaagctgattatgaaaagattgatttagttgatgacttgaagatggaagatatccaagctgctttagaatcaggagtagttaaagttaagaacttaactaaaggaactgaatttgaggcaacagttgatctaacagagaaggaaattgctgttattaaagaaggcggaagacttaattacgttaaagcaaatagttaattataagataaagagtgaaaatgcagggtctttaagactctgcatttttttataccaataagcatgtaaatgcttaaggtctataattcaaattcaagataggtgtaataggcaggtgatttgtaaatgtgattatacttacgttataattaattatctaatagaatgtatataaatagattgatgagaaagaagtgtaagtttaatggaaaagactataagattagcagggatagcatatgagagtttagttaatgggcccggtataaggagagtatttttttcacaaggttgtaagcataactgtaaaagttgttttaatcctgatactcatgatttttatggaggagagcaaagagatatagatgaattaattaatgatacattaaataatgaaattataaagggagtaacatttagtggcggagatccgtgggaacaggcagataaatttgcatatatggcaaaggagtttagaaaaaaaggtttaaatatttggagctatacaggatatacttatgaatatattttagaaaataaggattcgagattgggctggagtgatttattaaacaatattgatgttcttgtagatggaaaatttgaagaaagtaagatgtcagatggacttaagtttagaggttcaactaatcaaagaataatagatgttaaagaaagtataaaaaaagaacaaattgttattatagaactttaacattaatataagatgtttttgaaaatatccacaaatgtgtgagtataattaaaaaagttgtggattattatttgaactatgtggataaattttggagtaataaaataggcccatatatcacaatataagttatattacttatagtgaaagttaggtgaatgaagcttgattttgaataaagaattttataaacaaggtgcattaattttagcgaaagaacttttgggaaaagttattataagaaaggttgacggagtgacattaagagctaaaattgttgaaacagaagcgtatataggagaaatagataaggcatcgcatgcttataatggaagaaggactgaaagaactgaacctttatttagagaaggtgggattgcttatgtttattttatttatggaaaatactattgttttaatgttataagtggattagaagataagggagagggagttctaataagagcatttgaaccgttaaatgaatttgattatcttgcaaaaaaaaggtttaatcaaaattatgatgaactttcagaaacaaagaaaaaggcaattacaaatggaccatcaaaactgtgtattgcattttcaatagataaatcggaaaattataaaaggttatacgatgaaggtgatttttatatagaagaaggagaaaaagatacgtttaaaatagtggaaacgaaaagaatcggaatagattatgcagaagaagcaatagattttccatggagattttatatagagggaaataaatacatatcgaaaaagtagcaaacttttaatgtaattcctattaagcatttaactaaaatacaaatttttactaaaaagaaataaagagtaatatatttaatacgataaatctatcatgagatattttttataggagatagatttatgattactagagtaattaatagaaattttagtacgtataaatataaaaagagaaaagcatctttaaaaataaaagttactaaagaaaatattatatcgtttagtgaaatactcgagaatgtacaaatgcttaggaaaaaaggaattatatcagtatcagatcttaatagaaatatatctaagtctataaaaaagtagtaatataaagatgacagtacatggattaattaagacatgtattgtcatctttgtattacttattttctttatcaacattgattaatttatcagaaatgataaatctaggtctgtgtttagcttcattatatatttttccgatatattctcctattacgccaagagataagagctgaactccgccaagtacccaaatggaaagggttaatgaagtccaaccagtaactgtacggcctgaaattttaactataagagtataaattagggctgcgcctccagcaaaaaatatagtaaaaccaaggagggttattaatcttattggttttatgctaaaggatgtaattccgtccaaggcaaaggcaatcatcttttttagaggatatttagattcaccagcaaatctttcatgacgttcatattcaacaactgagtatttatatcctattaatggaatcattccgcgaagaaataaattaacttccttatattgacttaacccgtctacaacacgtttgctcataagcctataatctgcatgattatagaccatgtctacgccaagaatacgcattaatttataaaaacctaatgcagttgttctcttgaaaaaggtatcagtttctctagtggatcttactccataaacaatatcgcatccatcataatatttttctacaaatgcatctatgacatctatatcatcttgtaaatctgcatctaatgatatagtcatatctgaataatctttagcaaccatgagcccagcaagtaaggcattctggtggcccctgttccttgaaaggttgattcctgaaaatatattatttttggaatgaagctcttcaattattctccaagttctatcttttgaaccatcattaacaaaaagtattttgcttttattagatattaggttatttgaaatcatagtcttaatttttacgagcaatcttttactagtttcatgtaaaacttcttcttcattatagcaaggaattacaagatatagtatatccttcataaaatcgcctccaatgattagtataaccaaataaattaacaatattattcaattgtaatcttaatattcattattttataattcatatcttatatttgatataactacagaggtttcgcttattaaattaatttcagtgttaaccctacctggtctagaacttttaagaatttttacaataggccttagtgggaagttaggtatagtttcttgcacaacagctatgtcaccattacttagatcaactaaagttccttttgagaagggaattacaattttgcagaatatattaacaatttcatagtcaaattttttgcctgcattagacattaaatattcaagaacatcacttggaaacattgctcttttattaggtctaccggttgataaagagtcatatgcgttagcaatgcttacaattttacttaaggtacttatctcatcattagctagcctattaggataacctaatccgtcaggtctttcatgatgctgtagtgttattattttgctattagcgctcagattataagagtctgataaatatttatatccgagtattggatgttggtctaatattgtaacttcttcatccgttagttcttcctctttcataagaatttcctttggaataaatgttttcccaacatcatgaagcaatgatccaatacaaagatattgaagttgtctttttggaagcttcaatgcaattccaaggactagtgatattacggcaacattcacagaatgagagtagatataattatccatgcttcttatgtctattagtgaaagtaagacacttttattatttagaacattttcaattaaatcttcagccatagactcaatattattgaaatatactgattcattttttgaaaacttatcagcaacagtaagtctatttatatttgaaaaagcttcttttattgttagaattgctttttgtctcaattcaggtttaataatatcttcaatttcatcagaactaaattcatcaattatatatattgataaaatatttaaatcctttatcttaaaaataattctttcactaaggaccataccagctcttactaatactctaccatcagaatcgtataatgtcttaccaataactgtattcggttttacacattcaattggaattaatctcatattatcttctcctcaaatgttggttatagtacaatttacaacataattcttagttaaatgttaaacataatagtagtatatcagtaaaattggcgtatttatagtattatgatgaaaaaatatattattttgtttaacatatttaaaaaatagaactaactactagttagaaaacaggtctgataattagatttttatacaacagatttgatataagatactaaactcataattgataataaattaagtattttagcagatttaagtatatataagtccattaactttttatatcaataaatgataattttgttacttgatatttaaattgtgttataatattatagattacaaataaaaatatcaaagggggctttttcaatgtcaagagtttataatttttcagcaggaccagctgtattaccggagtcagtcctaagagaagctgcgggggaaatgctagactacaaggggacaggcatgtcagttatggagatgagtcatcgttctaaagcgttcgaagaaatcatcaccgatgctgaaaaaacattaagagaattaatgaatattccggataactataaggtattattccttcaaggtggggcatcacaacaatttgcaatgattccaatgaatctaatgaaaaataaagttgtggatcatattattacagggcaatgggcaaaaaaggcagcgtcagaagcaaaaatatttggaaaagttaatatattagcgtcttcagaggataaaactttttcatatataccagatttaaaggatttaaaagtttcagaggatgcagactatgtttacatatgtcataacaatacaatctatggaactacgtataaagaattaccaaacgttggggataagatattagtagcagatatgtcatcagatttcttatctgagccagtagatgtatcaaaatatggactaatatttgcaggagtacaaaaaaatgcaggaccagctggtgttgttgtagtaataattcgtgaagatttaatcacagaagatgtattaccagggactccaacaatgttaagatataaggttcatgcagacaataaatcactatataatacaccaccagcatatggaatatatatatgcggaaaagtatttaaatgggttaagaataagggtggactagaagctatgaagaaaattaatgaagaaaaagcttctattttatatgattttcttgattcaagtagcatgtttaaaggaactgttgtaaagaaagatcgttctttaatgaatgtaccatttgtaacaggttcagatgaactagatgctaaatttgtaaaagaagctaaagcagtaggatttgaaaatctaaaaggacatagaacagttggtgggatgagagcaagtatatataatgctatgccaattgaaggtgttaaagatttagtagaattcatgagaaaattcgaagaagacaataagtaatagaataaaaatcaactgaatttaaggagataatcaggttttggttatctccttaattaattttataaataaaattatactaatatctgaattataatatgtattatgtatagataatcaatacaatatatacaattttaaatattgttagtacatgtaatgtttttataagcgaatattagattaattgccatataaaagacatataaaagaatactcaggtatagattacagatgaaataaattttaaataaatctatagaagtataatagccatataaagatagtcaagcagaatacaaggtggaaaaatttaatataaatatgttttggattagttcataaatcttaatttgctaactaacttgatagaattttaaatgcaaagttactattgcaatatatatatattaaattaatcattacataatatcaaaaaaggagctatcgaattaatcgatatacccctctttattgataatataaaattaacagttgagtaattagaactcgcttgttccaggagttctagggaatggaactacgtctctaatattagtcattcctgttatatacataattaatctttcgaaacctaaaccaaaaccagcgtgcttagtttctccatattttcttaattctaaataccaccagtaatcatcttcagataggtttaattcagtcattctatcttttagcacatctagtctttcttctctttggctaccacctataatttctccgattcctggtaccaaaagatcagtagcagctactgtttttccatcatcatttaatctcatatagaaagctttaatatctttaggatagtctgttacaaatagtggctttttaaagtgttcttcagtaagatatctttcgtgctctgtttgtaaatcaatgccccatgatacatcgtaatcaaatttctttccacacttttgtagtatttcaacagcttctgtatacgtaactttagcaaaatctgatgaaactacgtgatttaatctttctaataaacctttatcaacaaattgattaaagaactctaattcctcaggacattcatccataacatatttaataacatatttaagcatattttcagcaagttccatatcatcttgtaaatctgcaaaggcaatttcaggttcaatcatccaaaattcagcagcatgtcttgtagtgtttgaattttcagctctgaatgttggtccaaatgtatagatatttctaaacgctaaagcaaagcattcagcatttaactgaccagatacagtaagattagtctctttgccaaagaaatccttgctgaaatctacacttccatctttacttaattcaggagttttaggatcaagcgttgttaccctgaacatttctccagcaccttcacaatcgctaccagttattattggtgtgtgagtatacacgaaattttgatcttgaaagaacttatgtattgcataagcagcaacagagcgaactctaaaagttgcagcaaatgcattacttctaggcctcaaatgagctattgttcttaagtattcaaaagtgtgtctctttttttgaagtggataatcagagtttgacataccttcgataataatattcttagcctgaatttcaaaaggttgttttgcttcaggagtagcaactaagataccaataactgaaattgatgaacttataggtaatttagatatttctttgaagttatttaacttatcgtcaaaaactacttgaatatttttaaagaaagaaccatcattaacttctataaatccaaaagcgttagatgatcttaaagttcttatccaacctgatattgttatttcttttgataagaaatcatcagtatttctgtaaagacttctaattaaaattgattttgccatattgcatgacctccattttataattaatcttgtgatcaaaacatattattaatgaaaaaaatttttcactattttaaaatatcatttatgtaacctattacccttgataataaatagattttacaatacttttttggtgaatgcaacttaggacctgtccctaaacatataataaaccagtgccttagagcgtctgagtataaataatacgtaaaataaatatataaactacaaatatatgtaatttatcataaaaaagctttattttttatagtaaaattataaaaaataaagctttttttatattaagagtatttatttaacatgcttgtctattctaagccgttttcaaaactctgaatcaattcttttggaaagtttaacattgtcatatctttaactatccttttatatgcgtagggaatttcttttatctgaactttcattccatcttccttactgatatttaaaatacaataagtgctatttggcctaccaatcttaggctttccaacactgccagagtttatatataccttatttttaaaatccttcattccaggtatatgcgtatgtgcacaaattaatacgtcgttagaaatggagttcataacttctgaagtattatctccgtcctttaagagatattcatttattttatctggacttccatgaacaaataagagacttttattagcaatattcaaggttaaagttgaaggtaaattagcaagaaatagtctgttttcttctcttaattctttaactgtccaaggaagagaaaaagcattaataggagtttctcttatatatgaatattcattatcaactacagaactatcataatttcctcttatgcaaagaatatgacgtctcctgatcatggaaattacttcgttagggtgaggaccataaccaaccaaatctcctaggcaaataattgtatcaactttctcaatatcaatatcttctaaaagattaataagagcatagacattagcatgaatatctgaaattattgctattttcatgagcattcctcctaagttatttagcaaattaagtatttaggcttttaggtatttttccccaacaataactacatcaccagcacctactgttaatagcaagtcaccagaaactagttttgattttacgtaattaagtgcttcatcatgtgagtgaacattgatacatttcaatcctttatttcttaatgcatcaccaagttcgtcagaagatacaagtccagtatttttctctctagctgcatagatgtccattagtataagttcatctgcatcattgaaacattctgtaaattcatcaaatagggcctttgttctagtataggtgtgaggttgaaaaatacaataagtcttattatgattcatttgtttagcagtacttaatgtggctttaatctctgtagggtgatgagcgtagtcatctataacagttacaccatttaattttcccttatattcaaatcttttatgcgctcctttgcagttcgataatccttcaataatacagtcattagaaatattaaatataagagaaacacaaatcgaagcaagggcattcaatatattatgcttacctggcacatttaaagtaatattgaataagttgttaccgtccttatacacatcaaaagtggcacaaccatttgtattgaaatgaatatttttagcagttaaattagcattgtcactaaatccataacttagagtattgcaatttgtctcagacagaatttcatttaccctttgatcgtcagcatatccaacaagataaccatcttctgggataagtcttgagaattgtaaaaatgtatcagcaatttcatctatatctttatagtaatcaagatgatcagaatcaatatttagaattattccaacgtaaggtgggaattttaaaaatgaacgtttatattcacaagcttcagttaagaaatattcactattaccaattctgaaatttcctccaattgcatctaattcaccaccaactaagatagttggatctaaattatcagcaagtgttatatgagaaagcatggatgtacatgtagtctttccatgagttccagatattgcaacactgtatttatgccccttcataatttgccctaagaattcagctctgtccattaatgcaatatttttttccttggcttctaaaagttcaggattatcagatgggattgcagcggtatagactactaaatctacattattaatattctctcttctatgacctatgtaaatttcagcacctgaagatcttaatttatcaatgattgcagaatccttaaagtcagagccagatacactataaccactatttaataaaacagcagcaagtccgctcatactaattccaccaatgccaatgaaatgaatttttttatctttatcttttataaaattgaaagacaaatgatcaactcctttttaattaataaaactaaatgttattataagttccaaaatttgagtatagaatttttagttttatactttaactataattatatacatttttcaaaaaatcaaccatagtaaaaaataaatacacaatattttatgcatatttagcgagtttgtgaacaagttataaatataaattaactttataactaaaaatattgatattaacttgaaattagcataaaatatgaatattaaagcgatttaatataaaaaaaattcgtgtgggtgattttatggagaagtttacaagaaataatagggtagttgccataacaaaaatattattagaaaacccaaataaaatattgggattaaataaattttcagaattactaaatgcagctaaatccactataagtgaagatattgttgttgttagagaaattctagaaagacttgaaatgggtaaagttgaaacaattgcaggagtagcaggtgggataaaatacattcctcaaagtggcgaagaagagaagaaagcttttgcattagaattatgtcagcaattaagtgatgatggaagagttataccgggaaatataatatatatgacggatctaatgtatgatcctaagataataaataaagcaggagtcatgctttcatcgtgtttccaaggaaaagagattgattatgtaataacggtagaaactaaaggtattcctttagcttatgaggttgctagaaatttaggcgtacaattagttattgctagaagagatagtcaagtaacggaaggtcctacagttactataaactatgtatcaggaagcaatggaagattgcaacaaatgtctctatcaaaaaagtccatgaaaccatcaagtaaatgtatattcattgatgatttcatgaagggtggaggaactgcaataggtattaaggacttattgaaagagttcgatagcgagctagtaggaataggagtattagtcgataataagcaaattgaaaaaaaattagtagacgaatatgtttctattgtagagttaaaagctgttgataaatcagcaattatagggatacaaccttcaaaaacattttcttaaaattaacagaaaattttactctaaagatgccgcgtaattccaaatacttttaattcagtatacatataaatgaacattaaatttgtagataggcccaacaagaaaaatattaattttatggtaaatatttattgttacttcaagttgtcgtgaatagaaattgttctgaaattcaaataggacaatcccagaaatttggtatttgtataagattacacaaaaaaataaattttataaggatttatcaaatataaaaaaggaatttagaaatttgtggagaaattatataatattaaatatttttaaggcaactgggaggggtggagtaaaatgcaaataacagatgttaggattagaaaaattgcatcagaaggtaaaatgaaaggaatagtttctgtcacatttgataatgaatttgtagttcatgatatcaaagttatagaaggacaaatgggtttatttattgctatgcctagtagaaaaacaccagatggagaatttaaggatatagctcacccaataaatacagaagcaagagaaaaaatacaaactgcaattttagaagcttatgaaaaagcagtctcagaagaagttgtagaaggctaggattttaacaaaaggaagttttaataacttccttttgttttgtcataaagtatttctatagccaaatattaaatgtactaatgggttgaaataagagtagctttccaatataattaaattgatatgaatatttaaccgattattgtaagtaaataatcgtgttaatataaatttataaatgaggtgtggtatataatgtataaatgtgcactggttttagcagcgggtcaaggtaaaagaataaaatctgatttacctaaagtattgcataaagtatgtggtaaagaaatgctaaaacatgttatagattcgataagaaaatcaggaattgatgatatagatgtaattatagggaaaggtgctgagcttgttaaagagagaacattagatagaaatgttagttattcaatgcaagctgaacaattaggaactggtcatgctgttaagtgtgctgaagagttcttaaaggataagaaaggagtagtcgcaatttttactggtgatactcctttaataaagcaatcaacaattgaaaggctatttaatgaacatatagaagcaaaaaattcagcaactatattaacagcaatagttaatgatcctacaggttatggaagaatagtaagaacgaatgacggcgtatcaaaaattgtagagcataaagattgcactgaagaagaacttaagataaatgagatgaattcaggaatatattgttttgatattgagctacttgtagatgcattaaacaagataacaaataataatggacaaggtgagtattatcttacagatgctataggaatattaaaatctcaaggtaaaaaaataggtgcagtcgtaactgaatatgaggaaactatcggagtaaattcaagagttcagttagcagaagcagaagaaatacttaagaacagaataaatcttatgcatatggaaaatggagttactctaattgatcctagaacaacatatatagggattgatgttgaaataggcaaagatacaataatatatcctaataatattttagagggaaatacaaagataggtaataattgcttaatttatcaaaattcaagaattgttgatagtaatattggtaatgaggtagatgttcaagcttcagttatattaaatagtaatattggtgataatactactgttggtccgtttgcgtatataagaccagaaacgacaattggtaagcatgcaagaataggagattttgtagaaataaagaaatctactattggagatggaactaaagtctctcacttaacttatataggagatgcagaagtgggatcggaatgtaatttcggatgtggtacagtagttgtaaattatgatggtaagaataaacataagactattataggagatcatagctttataggctgtaataccaatttggtatcacctgtcacaattcacgataatacttatattgcggcaggatcgaccattacatctgaagtaaaagaaggtgatcttgcagttgcaagagctaagcaaagaaatatcagtggatgggtagataaaaagggattaaaaaaataattttttaataataaatcagccaaaattttaaggaggtcttctcaattatgataactcatggaagaaatataaaagtatttactggaaattcgcactcacagttagctcaagatatagcagagattttaggagttccagtaggaaactctaaggtttcaacttttagcgatggtgaaatatctgttgatattaatgaaactgttagagggaatgatgtgttcatagttcaatctacatcttcacctgttaataacaatctaatggaattgctaattatgattgatgcatttaaaagggcatcagcgggtagaattacagcggttattccgtattatggatatgctaggcaggataggaaagttaaatcaagagatcctataaccgcaaaactggttgcagatttgttgactgcagcgggagcaaacagggtcttaactatggatttacatgcatctcagattcaaggatactttaatattccagtagatcatttacttggagcaccaatacttgctgagcattatatatcaaaaggattagtagatcaagatgatgttgttgtagtttcaccagatttaggaagtgtaacgagggcaagaaaatttgcggataatttacatgctccaatagcaatcatagataagagaaggccaaaggcaaatgtttcagaaataatgaatattattggtgatattgaaggaaaaagatgtatattaattgatgatatgatagatacagcaggaactattgcaaatgcagcgaatgcacttaaggatttaggggctaagaatgtatatgcttgctgtacacatggagtattgtctggccctgcaatggacaggataaatacttcagcaattgaagaattagtactattaaatacaattccgttaaaagaaggtaacgataatagcaaaattagatctatatcagtagctcctttatttgcagaagcaataaagagaatttatgatgatcaaccaataagtaagttatttgaatgtcaacaataaataataatttaaagagtttttaaataaataagatattgaaaggaatgtatatttactctaagtaattagggtaaatatatattctattttttatagttaaataaatttattttattaagttaatattaagattgtaaacgagaaaagttttatgatttaattaaaataggatctattaaataattattatacttatatatttttagaatatttattataattaaaggataattttgttttctataataaatagtatatttatgttatattaggatatgaatgcttatgtaatagtaataaattaaggaggaaagaagagtggatggagttacaaccaaggttctgattgtggatgacgatgaaaacattagtgaagttatagacatgtatttaaaaagctctggatataatacaaagatagccttgaatggtaaagaggctcaagaattttatttagaatataatccagatattgtcttgcttgatgttatgataccgtatatagatggaattgatattctaaaatggatacgaaaacagaaggaaactccagttataatgattacagcaaagggggacacctttgataaggttttagcactggaaattggtgcagatgattatatagtaaaaccttttgaacctaaagagttgttagccagagtaaaagctgtattaaggagatattcttcagagaatattaaaaatgaagtaataaaattaagtgatttatcaatagattcaacttcgtataaagttatatataatgaagaagaaataaaaatgccaccaaaggaatttgaactattatattatttggctaataataaaaataaagtttttacgagagagcaattactttgtgaagtatggggatatgattatccaggagattctagaactgtagatgttcatataaaaagattaagagaaaaattaagtagtggagaacagtgggaaatccaaacagtatggggtgttggttataaatttgaggtaaattaaatgaaaaagagtggaagcttacttcaaaaacttataataacatttatagttattttgactattgttttagtttcattagcttggttattatctatatggtttagaataacatattttactgaaaagaaggtgcagtttcagaaagatggagagtatatatccgaatctataaaaacatacaattctaacaaaaattcattggaatatgataaattacaggctatagtggatatgtcaagtgttggagcaaatgctgatattactgtttctgataagtttgataatatatatatatactccaaaacttcaagtactaaggagatagacaataaaccagagaatctagataatagtaaatattctttattggatggaaagccagtagagtatattggagatcgttacacctatatatatccgatattagaagatgatgagtttcaaggatatattgtaatgacagctcctttatcaacaataggtaaacagttgcatagaatatatcttattgtatggatatcggcattaggagcaatggtatttgcatctgtagttttatcattagtttcaaagaaaatattgattaatcctttagctgaaataaacaaggcagccaaaaggtttgctaatggagaagttaataaaagagttcatatagaatcgtgtgatgagattggtgagttggcaagttcatttaatataatggcggagtctttagaaaaggttgagaataatagaagagattttatatcaaatgtttctcatgagttgagatcaccaataacttctataaagggatttattgctggaataatagatggagtgattccaagggataaagaaggatattatttagacatagtatacagtgagataaaaagacttacaagattaattaatgatttactagatttatcagccattgaatcaggtaaattaaaattcaatataagaaagatcgatataaatgagttaattagattatgtgttataaataatgaacaaaagataagagaaaagcaaataatgttaaaaatagatttgaaagaccagaattgttatgtaaaagctgatgaagacaagacaatgcaagtcataactaatttattagataatgcaataaaatactgcggaaataatggaattataagaattagtacatattccaaggggtctaaagtatttgttgagatatataataatggacctaaaattgcagatgaagaaataaggcatatatggaatagattttataaatcagataaatctagaacaaacaaagttagtactggactcggattgccaatagtaagaatgataattatgcaacaaggtgaggaagtatgggtcaagaatcatcctaatataggagtcacatttacattttctcttacaaaatataaaaataataagattagataagagcgctaaggaggacacaagtatgtttttaatagtaggtcttggaaacccagggaatgagtatgagaatacaagacataatattggttttaaagttattgataatattgcaaaagagtataatattgaaataaacaggcaaaaatttaaaggtatgtatggagaaggttttataaatggaaaaaaggttatgcttttaaagccaactacttacatgaacttaagtggtgaaagtgtaagagaagtagttgatttttataaccttaacaacgatgagatactagttatatatgatgatatcagcctagaagttggaaaattaagaataagagaaaaaggaagtgctggagggcataatggaataaagagcattatagcacatttaaatagtgaaattttctcaaggataaaagtaggggtaggacaacctaatggagatttagtaaagcatgtattaggtaaatttacaaaagaagaaactgctattctaagtgaaagtatagaagcgtccacaaaggcggcggcggaaataattaaaaatgatgttaagacagctatgaatcagttcaatgggttcaaggcgagtacaacagtttaaggaaggtgcatgggatgagattaaaagggttattggagcccttggaaagtagtttagaatttcaagacataatacaagggattgaaagtaaaagataccctattggtatatatggtgcatctgaatcaggtcgaggatacattataagtggaatatttgaaaatactaacagatcaattgtggttgtaactcaaagcgatatggaggcaaaaaatctttatgaagatttgatattttatactagtgaggtatattattttccagtaaaggaaatggttttctataatattgatgctatctctggagatttgagatgggcaagattaaaagtaataaatgaaatattaaataataagaaaaaaataatagtgacatcaatagaagcttttgctgcaaaatatactcctcataatttgtttttggaatacagcatgaaatttaaagaaggcgatgaagttaatcttgccgatatatcaaagaaattaattcaatcaggttatgaaagagtggaaatggttgagggcaaaggtcaattttcacttagaggaggcatattagacgtatttccaacaggttcaacttatccatatagagttgaactttttggcgatgaaatagaatcaataagaacctttaatacagaatctcaacgaagtattgagaaagttaaaaagatagatattttcccagcaaaagaagtaatagtttcagaagagatgttagaggttggaagaaataagcttaaggaagagtttaataaaattgcggaaagtgataaagatagtgaaagagtagaaaaactaagaaaaatattaaataaaaacttagaactactagaagagacttcgtcttttgaaacaatagatagttatcttccgtactttaccaaagaaacagaaagtctttttgattattttaagaattatttctttatagtagataatgttcaaagatgtaatggaaaattagaatcaacttatttagagtttgaagaaaatttcacagctttttctcaaagaggagatatatttcccgggcaaggaaatttattaataaataaagaagaagtattagaatcatttgaagatgaaaagattgcttttatcgaagcattgacaaaagtttctggctggctaaagccactatcaatagtaaatgtagctcaaacaacattaaataactatcaaggtcagctagatttattaattgacgaaatattaggtaaaaagaatttaggatataagacactaattttatcaggaactcgagctagaggggaacgtttagttggaacattaagagatagaggtatagaaagtgtctataaggatactgttgataaaattgaatatggtgaagttgtaataacttttggtaatcagttgagaggatttgaatatccccaatataaagtatgtataatatcagataaagaagtatttggtgcggcaaagagaaaattaaaaagtagtaaagcaaagaaaaagggaatttctaaaatcaagagctttgcggaattaaagccgggagattacgtagtacatgcaaatcatggtatcggagtatacaagggaattaaacaaatagatgttggaggccataaaagagattatttagatattgtttatgataaaggcgataaattatatgttccagtagatcaattagatttaattcaaaagtatattggaagtgaaggaaagtcacctaaagttaataaacttggaagcgctgaatggcaaaaagcaaaagcaaaggcaagaaaatcaataaatgaaatagctgaagatctagttaagctttacgcaatgagaagtactgtaaaaggacataagttttccaaggatactgaatggcaaaaacaatttgaagatgagtttccgtttgaagaaactccagaccaattaacatcactagaagaaataaagatagatatggaatctgataaacctatggatagacttttatgtggagatgttggatatggtaaaacagaagttgctataagggctgcatttaaagcagtaatggatggaaaacaagttgctcttttagttccaactaccattttagcagagcaacattataaaaatataaaaaatagattttcggattttccgataaagatagacatggtcagcaggtttaggacggcgaaacagcaaaaagaaatacttcaaaaggtgaaggaaggtaatttagatattttaataggtactcatagattggtatctaaagacattcaatttaaagatctgggcttattaatagtagacgaggagcaaaggtttggagttaagcaaaaagaaaagattaagggaattaagaaaaatgttgatgttttaactctaagtgcaactccaattcctagaaccctgcatatgtcgctaagtggagttagggatatttcagtcatagaaacaccaccagaagaaagataccctgtccaaacatatgttgttgaacaaaatgatcagcttataagagacgcaattcttagggaaataggtagaggcggccaagtttacttcgtatacaatagagtggaagatatcgaaaggatggctaagtatgttcaatcgttagttccagagagtaaggtcggaattgctcatggtcaaatggcagaaagacaacttgagaaggaaatgtttgactttatgtcagaagagtataacgtattagtctgcactactataatagaaactggaatggatattcaaaatgtaaatactataataatatatgatgcagataagatgggactttctcagttatatcagcttagaggtagagttggaagatcaaatagaattgcatatgcgtatttgctatatactaaggataaagtattaacagaagttgctgaaaaaaggcttaaagcattaaaggatttcactgaattgggctctggttttaaaatagctatgagagatttggaaattagaggtgcaggtaatatgatgggatcttctcaacatggacatatggcctctataggatatgatctgtattgcagaatgcttgaagatactgttaaacttcttaaaggtgaaattcaaaaagaacctatagaaacaaccttagatataaaagtagatgcctttatatcagaaaattatatagaagatgaaattcaaaaaattgaagtttataagaaaattgctgcaattgagggattagacgattatagtgatatcaaagaagaactagaagatagatactctaagataccagaacctgtgtataatttaatggatattgcttatataaagagtagagctaaatctatattcattgaagagataaaagaaactccaaaagaattattgttcaagttttcacaaggtgaaagtgaatataaaaatatatttaaaatattgatggaaaaatataagaatagcgtagtattaaagtttggttcaaacccttatttcgcatttaaattaaaatatattaagaaggaaaataaattggagtttctgaaggaagttttcgatgacataatattgtaacaaatctatgatataaaagaaaagtagaagaaataaaatagtgtaaaaaatttgaattataaaagcaatattgatatactaatgttatgaatttttacagtaagaaacctaaaagaataatatcgtccgacaaaaattaatttagcttttcaaatttcgttttatgattctagaaagttttgtttaagtagaatttgaaaagtgattttagcttgtctaaattatatatatttatgtggaaagttatttttagtgggtttaaatctagaataagcgaggggaaaactttgaaaaaattaaaaaaatttgttgcagctttagctatggtgacaattgcggtatcagctatgggttgcaaaatgattgagaaaacaccagaagcgatacagaaaacagttcttgcaacagttggaaatgaaaaaataacaaaaggtgatttagataaagaaatggaaaagtatactgcacaactaaaacagcagtatggagataattatgaaagtaatgctcaagttaaagatcagttacaacaagcaaaaaaacaggaattagatagcttagtaactcaaaaagtagtattacaaaaggctactgagttaaatcttaagccatctgatgatgatataaataagcaagttgatgatcagatagctcaaattaaatcccaatattcagaagaaggacaatttgaaagtgttctagagcaaaatggattgactgaagatcagctaaaagatgttgtaaaaaataatgttataatgcaggctgttcaacaagatatagtgaaagatatagaagttactgatgacgatgttcaaacatattataatgaaaataaggattcaaaatatacacaaggagctggagcgaatgcatcacatattctaatagctgaaaaggctagtgatggatcaatagattatgatgcatcattaacaaaagctaacgatataaaagcaaaattagattctggagctgattttgcgaaattagctaaggaaaactcaacagattcaggaactaaagataatggtggtagtttaggatttgtagcatataactcaacacaattagttgctgaatttatggatgggtttaagaatttgaaagaaggggaaatttcagcgccagtaaagagtcagttcggatatcatataattaaggctactggattaaaagactcacaagtaactccttttgaacaagttaaagatcaaataaaatcatcattattacaacaaaagcaacaagatgctttaagttctaagattacagaatggaaaacagacctaaaagtaaaaacttatgaagataaattataatactaaaatataattaggtagctattaataatttagctgttaataatgaaagttaggactactttgaaatatctctgattattcaaagtagtcctatttttgtttctactatatgtattacattgaaataacagcatttatattaacaaaaaaataattaatataaaatttgtctataagtgtataaaatttctagaaattcaaataataatagtgcaaccaattaatagagttcaaaggaggttatataaccaatgaaggcaacaggaattgttagaagaattgatgatttaggaagagtagtaataccaaaggaaataaggagaactttaagaataagagaaggggatcctttagaaatttttaccgatagagatggtggagtaattttaaaaaaatattcaccgattgaagaacttactaacttttcaaaggaatattgtgaaagcttgcaacaagttataggtcatgtagtactaatagctgataaagatgcatttgtttcagtaagtggtgcaccaaaaaaagactacatagaaagaaaagtaagcagtgagctagaaaagataatggacggaagaaaaactgtattattaaataaagctgataacgcagtaataccattacataatgatgacgatgaaacagagtatactagtcaagttatatcaccaatcatagctgagggtgatgaaataggagctgtaattattctttcaaaagaagatggagagcttggtgaagttgaaacaaagctagttgagacagcagcagcattcttaggtaaacaaatggagcaataatacttataaataaccacattatgaaaataaaaggaataatacctccaaacttacaataataattaattagtaacatgtaaggttggaggtgttttatgaaaaaacaatccctaataagagggagcataattcttggagttgcaggaatattaacaagatttttaggtctattctttagatggccactaataatgttaattggagatgagggaattggatattatcaaatgtcatacccgctatatatgttttttatagctatggcttctggagttccagttgcaatttctaagatgatatcagaaaagaatgcaacaaatgatatatatggaagctttgaagtaatgaaagaatctgctattttaatgacaataatagggacaggcacaactttagcattattcttttttgcaaaaccaatagtattatttttgaagtgggatccaaaagcgtattattcattaatcggaatatcatttgcaccaattgtaatatcatttgtaactatatttagaggattctttcaagggttacaaaatatgactccgtcagctatatcacagataatagagcagattggtagagtcatattcggtgttggacttgctgtatttttactacctagaggcatagagtactcagcaggtggtgcagcatttggagcaactgcgggagctgttcttggaggagcttatttatactcgaattataaaagagtaaagaaacgttatgccattaaaaaaataaaaagcaatccagaaatattaaatactatattaaagattgcaataccaatatcattaggtactacagtatcaagtattatgaatttaatagattccattttagtaccacaaaaactattagatgcgggattcacaaatgtacaatcaactgtattatatgcgcaattaacaggtaaagcgtctgtaattgtaaatattccattaactctttctatggctatttgtacatctctaattcctatcatagctgagaatttcatacttaagaaacagaaagagctaaaaagtaaaatagatgcatctatgaaaatggcatcagtaattgctattccgtgcacttttgggttattctttttagctgaaccagtaatgaagtttatatttccaggcaggtttgaaggaatagagatattaaaatatttatcattaacaattccttttataataattactcaaacaacaacagcaatactacaaggaacagggcattatataaaacctgttattaacctcttgattgggtgtttgattaaaattgtattaacgtgggtattagttcctatgcaaatgtttaacatatatggtgctgttttggcgagctttggagcttatttaacagtaagtattttaaatatagtgatgatgaaatttacactaagagtaagacttaatttatacgaaatattaataaaaccttgctatgcatccagtattatgatgttaattgtattaataagttataatattttatataagaatacaattagtaatggaatatcttgcttgacatctatatttttgggtatgatagtatatattataatgataattgtattcaaggtatttaatgttgaagaaataagagatagatttaaaagaaagtaaaaaggagagaaattctaatgattaagatagtgggattaggaccaggaagtaaggatgcattgacaataggaacaataaatgaactcgaagcaagcaagcatatatttctaagaacagaaaagcatccaacagtagattacctgaaggaaaaaaatattgtatttgatacttatgataatatttatgatagcatagataattttgatgaagtatacttaaatatcgcaaaagacataattaataaacataagaatatgactgatttaatttatgcagttccaggtcatccattggttgcagaaaaatcagtatttaacttaatagaactatgtaaagaaaatggaatagaatataaagttataccagcagtaagttttatcgatgcaatgattgaaagccttaagattgatcctatagaggggttaaaggttatagactcttttgacataagtaaccaaattttagacaaaagaataggaacaattattactcaggtatacaatcaattgatagcatcagaagttaaattaagattgctagaatgctataatgatgaaacagagatttattatgtaagagcagccggaatagaaggtcaggaaagcataagaaagataccgttatttgaactggatatgcaggaggacatagattatttaacatctatttatataccaaaggatttaaaaaacaaaaaagactttaatgactttttagatataatagaagttttgagaggtgaagatggatgtccgtgggatagagaacaaactcataagtctcttaagaaggctttaatagaagaaagctatgaggtaatagacgcaatagatcaagatgatgataattcgttaatcgaagaattaggagatgtacttcttcaagttgtttttcatgcatctattggaaaagaagacggatatttcgatataggagatgtgatagaaggaatttgcaataaaatgataagtaggcatcctcatgtatttaaagatgccgatggattgaattcttcagaagatgtactaataaagtgggatgagttaaagaagaaagaaaagggatataatagtgttgtagatgaactgaaaggaataacaaagggactacctgcacttttaagagcacataagattcaagaaaaggcaagtaaggtcggatttgactttgaaaatatagattttgctgtaagtaaggtaaaagaagagttaaaagaagtaattgatgtatataatacagaaaatgtggagaaaatagaagaagaagtcggagatttaatattttcatgtgtaaatattgcaaggtttctgaaagtagacgaagaaatagcattaaattatactatagacaagtttataaaaagatttcagtatattgaaagagcagccaaggataagaatattgaattaacaagtatgactttagatgaaatgaatgaactatgggaaatttcaaaaaacttaggttaataggtaatttaaataaaggaattttctagtttatgaagaataataattttataaagaactactttgtaacgatttattggattatttagttatatataggaaaagaaagcgtttttctatagacgggtagctgaagaggttatataataaagaagtgcaatttagtacataaagaaaacagttagaaaatatgtaactggattttaaggaggatgttattgtgaataaagcagaattaattactagtatggcggaaaaaagtaaattaacaaaaaaagatgcagaattagcattaaaagctttaattgaaagtgttgaggaagcactagaaaaaggagaaaaggttcaactagttggatttggaacttttgaaactagagaaagagcagctagagaaggaagaaatcctagaactaaagaagttataaacattcctgcaacaacagttccagtatttaaagcaggtaaggaattcaaagataaagttaacaagtaataaaatacaagttagacagagtaaatatgaacccgagttttctcgggttcttttgaatggaggagaaattgtgaggctagataaatatttaaaggtatcgcgtattataaaaagaagaactgtagcgaaagaaatatgtgagagtggccgtatattaataaacgggaaagtagcaaagccttctacaaaaataaaagaaggggatataattgaaataacgtttgctaataaagtattaaaagcggaaattgctagtgtagtagaacatgtgagaaaagaagaagcaaaagaaatgtatattatccttgagggtgaagaagataaagagtagaaactatatagtttatctactctttatctatatatgagtattgaacaaaaaagatttatgttaagtgaaattatcataaataataacacttaacagcttttaagaaataaattccactatacttaacttattaaaggttctaaattctaaaatgcaaaatacaaacatatattgtataagaaaaataaatggaggaatttttaatggagaaaagagtggaaaataaagtagaagataataaatcaagtttatctctagagaatagaaaaaaattaactttaagtggtgttatagaggttataagttttgatgagcaaaaaatagatttaacaactaatctaggaaatttaactatcaagggagaagagttaaaaatgaacaagttggatgtgcaaaatggtgatgttataattgctggaagcattgcatctatggtatataacggaaagatatctaagaaaagcaatgaaagcataataagcagattgtttaagtaggaatatagtatgcctttaggattgaatatgcagattaatcttgttatatgcagcttaattggaggtgttataacgggaatattgtttgatatatatagaggaataagaggattaaactctataaagatattaacaataatagaagatatgctattttgtgtacttattgctttgattgtttttacctttttattatatactaattatgcatttttaactccctatgtatatattttcataattatggccattatattatactttaaatttattagtaagtatttttataacagcgagatgctaattgcaaaattatcttataagttgattagaattttattgaaaaatttattatatccattaaaaataattgcatataaaattacagataaaaggaaatgataaaaaattacttgaataatactaatatagtgtttacaatagacttaagagaatttgcaaaatagaggttcttatagatgaaaacgaagttaatattaaagcggacaataattactggatttattattttctttgcctttagttacattaggcaaagtatgacaatgaatagaattcaaaaggaaattgacagtaaacaagttcagttaaatgaaattaagcaaaaaaacgaaagacttcaagatgaagttgataaaattaattcaaactcatcggattatcttgaaaaattagcaagggaaagacttgggatgattaagcctggtgaaaaagttgttaatggtgagataacaaatcaaaattaaatttcaatttatagaaaaacttataaaactctggtaatattatagtagctaaataattaaatttgtattctaaattaaagagcatctgcacagcagatttgttcttataaatttatatatttttaaatttaaggaggagtcttttaaacatgaccttaatggcaggaaacatagtagagggcacagtgataaacatcacaaactttggagcttttattgaagttgaaggcaaaactggattagttcatatttcagaagtggcagattcttacgtaaaagatattagagaacatcttagtgagcaagataaagtgaaagtgaaagttatctcaattgatgataatggtaaaatcagtctttcaataaagcaagcaaatgttcaaagaaaatcggttaaaccagcagagattgattggaaggcacctgataagaagaaaactactaattcaggaaatttcgaagatattatgtctaagtttctaaaagatagcgaagaaagaatgcaagatgtaaagaaacatcaagaatttaaaagtaaaggtggaaaaaaaggctgttaaaaatttttgaaatctttattaggaaaataaatataaaatttgcttgataaatttcaaatgtagaatagatttgtagagaaatttttatatttgtttacagtttattctgcattattaagattataaatggatatttatagtgcttaaaacttgtgatttactgattattgcaattaaaattttaaatatataagattaataaaaaaatattgttgacactaaaaagaatatgtattataattagctttgtcgttggcacttagtttataagatatgccgaagtggcggaactggcagacgcacaggacttaaaatcctgcggtggttaaacaccgtaccggttcgattccggtcttcggcaccatgtatatgaaaaaaataatatcgcggggtggagcagttggtagctcgtcgggctcataacccgaaggtcgtaggttcaagtcctgcccccgcaaccattgatatggcggaatagctcagctggctagagcactcggttcatacccgaggtgtcgtaggttcaagtcctatttccgctaccaatatgtgccgaagtggcggaactggcagacgcacaggacttaaaatcctgcggtggttaaacaccgtaccggttcgattccggtcttcggcaccatatatatgaaaagaataatgtcgcggggtggagcagttggtagctcgtcgggctcataacccgaaggtcgtaggttcaagtcctgcccccgcaaccattgatatggcggaatagctcagctggctagagcactcggttcatacccgaggtgtcgtaggttcaagtcctatttccgctaccaatatgtgccgaagtggcggaactggcagacgcacaggacttaaaatcctgcggtggttaaacaccgtaccggttcgattccggtcttcggcaccatatatatgaaaagaataatgtcgcggggtggagcagttggtagctcgtcgggctcataacccgaaggtcgtaggttcaagtcctgcctccgcaaccataaagtttagtaagttttgttatcaaagctttaatttatatgtcgtaagcttgtatgatacaatgaatatgccgaagtggcggaactggcagacgcacaggacttaaaatcctgcggtggttaaacaccgtaccggttcgattccggtcttcggcaccatatatatgaaaagaataatatcgcggggtggagcagttggtagctcgtcgggctcataacccgaaggtcgtaggttcaagtcctgcctccgcaaccataagacttaagcaatagctcaggtctttttttgtttggaaaatatttattatatgaagtataagataaaggtataatattctgaataaattcctagccattgagaagaaaactttagcatcgatttataattctaagaatgagatatttaaagtttacttttctaacatggtgtttaaattagttatagatagaagtttaatatgaatgtagatgactacacttatgttaggctttttttagtacttaatattttgagtactgtaagttaacttgtcataagattgattactgaatacgaattttggtcacttaagccaagaaaatcggagaataatcgtaaaaaatattattttaaggagtaattaaaaagtgtattcacgatttataattttatgaaaaatattttatatataaatttctaataaaataagattaacgacaaattaattataacgttctaattttaataattagccagatatcttgatttaccttgactaagtatgatattagatcaaaatgtaataaagaaaataatctattaaatcattagatattagagaaatatagatgaagttgtcctacgaaaactttatacgataaacaccttatgacatttatcgtaaggttatgatgctataatcaagttacattatttggaaatgaggcgagctaatgtgcagtatggattagggttggataagtatgaaggaataactagagtagaaaacttaagaaaaaagttatggatgaaaacatctatagtgaagttagggattattctaatgtcaggaatcttgctcggtagagtaaatttattattaaatcaatcagatagtcttggtatagcgccaataggaattgcgtatttgatagctgtagttacaaaagagaataggagaaatagtttaactgtggcgataggaatcgctataggatatctaacaataagtagtttactgacagacggttatgtatatttagtatctgtagctttagttacaatttactatgtgtttatagcatcagctaaaaatagaaaaaaagaattagtgggttttgtaataattctaagtagttttttttgttatggtctactagttaataaatatgaacttggcgtaaatataactttatgtttaatacagacattaattgtattgcccatatattatgttataaagtatgcgttaaattctttggaagagattaatactaattacttcttttcttcggaggaaatagtaagtgttggaatatttttgtgtttattagttgcaggaataggtaatataaatattagtaattactctataagaaatatatgcgcacttacattagttttgacaattgcgtatgtaggtggcgcaacatatggaactatgattggagtttctatgggtataatgcttggagttgcttcaaatgacatgatgtatagtgtagccttttttggagttggaggcttaattgttggtatatttaaagatacggggaaaatattttcaatactatcaggtataataatttatactgcattagctttgtactctaatgcagtaacattgaagttgggagttgaggttcttactagttctgttttatttttgtgtgttccaaaacctgtatttacaagtattgaaattgagataaatccatatagaaagaaagcatctttaggcgaaattcaattgaatgcaataaaggaggaatttacttttaaattaaaagaacttacaagtgtacttacaaatgtatcaagatgcttattaactaacaatgataatgaaaatttattgattaaatcgaaagggagtgcattggtagaaaacttggcagatagaagttgttcaagctgcgaaaatagacctttatgttgggaaagagagtttcatcaaacatttaactcttttcaaatgttaattcaaagtaaagaggagggcaaattagcaattcctatggatttgcaaaaaagatgtattaagaattttacacttttaaaaaatgcagaagggattgtaactaattataatgtaaatgaatcaataaaggaaaggttagcagaaggaagaaatatattatcatcccatataactaacatatcgtgtgctttagataatcttcttaatgattttaaaaaggaggttagaatagatactgatttagaaagattgacgaaacgtatactgaataaaaactccatatattacaatgatattttttgctatatagataaaagcggtagggttaagattagattaagtgtaaataattgcgaaggagctgattattatggaaaaaacatagtttctctattgagcagtgctatgagaatgaaattatgtattggggatgatggttgtaaaataaatccacagacaaatgaatgtattataacgatagaagaaaaaccaaagtattatatggtgtcttatggtgcaatggaaccaaaaggtggagaaactcaaataggtgatagttatagttttggaaggacaagaaatggaacgtatatgacaattctaagtgatgggatggggtctggaccagaggctaaggaagaaagcaaagcaactgttgatttggtagaaaagcttattgaagcagggttcgatgaagatataacggtcaacacagttaattctataatgggaatgagattttcggaagatgaaaaatatgcaactttagatttaaatagaattgacttatataatggtaatgcaatatttgtaaagataggcgcagcacctagctttataaaaagaggccgtgatgtaatatctattaattctaagaatttaccttttggacttgtagatgaagtggacgtggaagttataagagaagtgctacgacctggtgatattttaattaatgttagcgatggtattttagatatagataaatcaaactctggagaatcaacttggattgaagactatttaaagacaattaattcagatcctagagaactgtcagaaaaggtgctagaaagagcgaaaaaattaagtaatggaacaattaaagatgatatgacagtagtagtttcaaaagtttatttagatagctaagattatcatgcaataagttattaaaatattataaatagctgtttcaaaaatttaaatcgtaagttaaatttgaaacagctatttatatttgtttcatatttaagtaaataaataagattgtttttaagaataatgttatatttatatagaatgagttttgaactgttaaattgaagcaataatgtttacatttagaacatatatacgtaaaatataagaagcggaattgtatatgacataataataaataagtaggagtgttatttttgtatagaaaagtactgtcttatataaaagacaataaccttattaaacccaatgataaaattttgattgctctttctggaggaccagattctatatgtcttttgaatgttttatttgagctaagagaaaaattaaatataagtatagctgctgcacacttaaatcatcttttaagaggcgaagatgcatttgaagatgagagatatgtcattaatacatgcaatgatatgggaataaaatgttttgtcaaacgtgtagatattaatgcttattctaaggaaagtaagttgtcttcggaaatggctgggaggaatgctagatatgatttttttgatgaaatcttagaaaaagaaggctttaataagattgctactgcgcataatgcaaatgatcaggcggagacagtgttatttaggcttatgagaggaacaggccttgaagggttgggaggaattagggcttctagagatgataaaataataagacctattttatgcttgagtagagaagaagtagaaaactacgtaaaactaaagaacttaaatccaagaatcgataaaactaactttgaaaaaatttataatagaaataaaataagattagatatattgccatatatgaaagaaaattttaatgaagatatagtacagactttgaataggatgtctacattattgcaaaaagataatgaattccttgaaaaattatccgctggtttatacaataaatattgtatggaatgtaatgattattttataataaaaaaggaaatatttaaagaggaagaacctttggttaatagagtattaaggcatgcgttaacaaggtattcaaagtctaattacgattttgaagttaagcatatatatgaaatatcttgtttggctcaaaaatactctggaaagttagtgcatcttccaaatggagtttgtgctgaaaatgtttatggagatatatacataaaaacaaagacaaaaaaatcagatataaatagtaaaaaagaagaaataattttaggtaaagataacatatatataaatacagttgagtttcataagtatgttattcaattttctataattaatggttataatgaaaattctataaacttaaagcaaggagatttcgttaagtattttgattttgataaaattaataataatatttcaatacgaaatagaaagaatggagataaaattattccactaggaatgagtggtagcaaaaaattaaaagatatttttattgatatgaagattcctaagaatgaaagagaatgcatccctattttatgctttgatgaaaggattgcatgggttattggaattagaatctcagaagaatataaacttacaagtaaaagtacgaatatattaaaagtagtcgttcaaagaaaggaatattaaatatgaaacaagatatacaagagatactatactcagaagaaattttaagtaagagaattaaagaacttgcaagtgaaataagtacagattatagaggaaaagatttacttatagttggtattttaaaaggatcagtaatatttgctgccgagctaataaaaaacatatctattaaatgtgaaatagattttatggcagtttcaagctatggaagttctacagaaacatctggtgtcgtaagaatattaaaagacttagataatagtatagaaggaaaagatattttagtggttgaggatatcgttgatacaggagtaacattaacatatttgcttaaatatttaaaagcgagaaaagcaaatagtatagaaatagttgcattactaaataagcaagcgaggcgtaaatctgatttagatgttaaatatattggatttgaggttcctgatggattcatagtaggttatggaatagattatgctgaaaaatacaggaatttaccttttatagggatattaaagcctgaagtatatgaaaaatagaaagttcaaatttaattgtaataaaaatattcctatggtaaaattttaaatatgatgagagaggggggccttgaatgaaaaaatattcaagtgcggctgtatggattgtatgctcagttatgctgattttagcagcagttactatgtggcaaacaggaaaaggttctaatgagataacttatagttcatttatacaaaagtggaattcaaatgaaatagaaagtatcttagtcaaggaagacagcatgactatagaaggaaaaactactgataataaaagttttgttactattgctccgggtgaacttgttagttcgcttatagtaaatcagcctaaattagatgttaaagtcgtttttgagaaaccatctaataatgcaacatggatagcaacattacttccatttatattaatggcagtatttatatttatattcctatttatatttactcaacaatcccaaagcggaagtggtggaagaggggttatgaattttggtaaaagcaaagctaaaatggtaactccagatacacaaacagttacatttgaagatatagcgggtgcggatgaagagaaagctgagcttgaagaaattgttgaatttttaaaattgccatcaaagtatatacagataggcgcaagaattcctaaaggggttttattagttgggcctcctgggactggaaaaacattacttgcaaaagcgatagcgggagaggcaggcgtgccattctttagtatatcaggatcagattttgttgaaatgtttgttggtgttggtgcatcgagagttagaagcttatttgaagaagcaaagaaaaattcaccttgtatagtattcatagatgaaattgatgcagttggaagacagagaggtgcaggcttaggtggaggacatgacgaaagagaacagacattaaatcaacttcttgtcgaaatggatggattcggtgctaatgaaggtatcataatgatagctgcaacaaataggcctgatatattagatccagcgttattaagaccaggaagatttgataggcaaataattgttggagctccagatgtaaaaggtagggaggaaattcttaaagttcatacaagaaagaaaccactaaatgatgatgtgaagttagatgtccttgctagaagaactccagggttttcgggagcagatttagaaaacttaacaaatgaagcggcattacttgctgttagaaaagacaaaaaacaaatttctatgtctgaaatggaagaagcaataacaaaagtaattgcaggtcctgagaaaaagagtagggtaataactgaacatgataggaaattaacggcttatcatgaagcaggtcatgcggttgttatgagattgcttccacactgtgatccggttcacgaaataagtgtaattccaagaggtagagctggtggatatactatgcatcttccaaaggaggatacttcttatacatctaagtctaaattaaaagatgagatggttggactcctaggtggaagagttgctgaaagattgattatgggagatataagtactggtgcaaaaaatgatatagatagagcaagtcatatagctagaagtatggttatggattatggtatgagcgaagaaattggaactatatcatttagtacttcagggcatgatgaagttttccttggaagagacttaggtaaggggagaaactttagcgaagagataggttctaaaatagataaagaaataaagaaatttatagatgaggcttatgatagagctaataggcttctaaaagaaaatataaacaaattacatgctgttgcaaaagctttaattgaaaaagaaaaacttgatgcagaagaatttgaagatatttttgtaaataattaatacacaggctatttcaggcacaaaatgggtttgaaatagccctttaattttttatatgtagaatcatagaatatttatattaatacgaatattcggagtccatttatacttattattcgaaaaaacttttattatgtatagtgaaatgatataataaattatattaagtatgattttgggtttatatttaggagggattttaaatgaaaagtgatattcaaattgctcaagaggcaaagatggagccgataaaaaatgtggctgaaaaattgggactttgcgaagatgatatagagtactatggaaaatataagtgtaaaatatctttagatgtatatgataaggttaaaaataataataatggaaagttagttttggtaacagctataaatccaactcctgcaggagaaggaaagtcaacagttacagtagggcttggtcaggctttaaacaggattgggaagaaagccgttatagcattaagggagccatcattaggaccggttttcgggattaagggtggagcagctgggggaggatatgctcaagttgttcctatggaagatattaatcttcattttactggagatatgcatgctattacatctgctaataatttgttatcagcagcaatagataatcatattcaccaaggtaatgttttaagaattgattctagaagaattgtatttaaaagagtaatggatatgaatgatagagcgttaagacatatcattgttgggatgggtggaaaggttaatggatttgttagagaagatgggttcaatataactgttgcatctgaaataatggctatattatgtttagcaagtgatctagaagatttgaaagaaagaatgggtaatatagtaattgcatataatttagatggaaatcctgtttatgctaaggaattagaaatacaaggagctatggcgctactaatgaaagacgcgattaagcctaacttggttcaaacattagaaaatactcctgcattaatacatggaggaccatttgctaatattgctcatggatgtaattctataatggcaactaagcttgctttaaagttgggagatgttgtcataacagaagctggatttggagcagatttaggtgcagagaagttctttgatattaaatgtagatatggtaatttagaacctgaatgtgttgtagttgttgcgactataagagcattaaagcatcatggcggagtagctaagactgaattaaatatcccaaatgttgaagcactaaaagatggaattgctaatttggaaaaacagatagagaatataaagaagtttaaaatcacacctgttgttgcaataaataaatttgttacagatagctcggaagaagtggaattcattaaagatttttgcgatagaattggggttaaagtagcattgtgtgatgtgtgggctaaaggtggtgaaggtggaattgaccttgccaatatagtgttagatgcactagagaatagtgaatcaaattttgagcctatatatgataaggaaaaatctattagagagaaaatatttacaattgctagtgaaatttatggagcagataaagttaattatactccagcagcaaaaaaacaaattgacgaattagaaaagtttaagttggataaacttcctatatgtatggcaaaaacgcaatattcactatcagataatcctagccttttagctagacctacaggatttgatattacagttaaagaagtgagagtatcaaatggagctggatttatagtggttcagacaggtgacataatgactatgcctggccttccaaaggtaccggcagcaaataagatggatgtattaaaaagtggagaaataataggattattctaatgaatgcatatatgtgtatttaaggtgaaaacagaagctagaaaatggtggtattaatctaaaatcacatttaaactcttgacaaattaaatataattgttaaaattatattgttattttttagtcaatttcaaaattaaggcagctcttcgggctgcttttaatttaactatattaaggtggtgctttctatgattttacttgttgatgcaggtaatactaacattgttttgggagtacataatggagaaaggtatatagctagttggcgtatttcaagtgaaggaaataaaacttcagatgagtatggtatacaagttatgcaactatttaacttaagtgacattgatcctaaaaatattactggagttatagtttcttctgttgttcctaatataatgcattctttagaaaatatgttaagaaaatgtttttgtcacgaacctataatagttggaccaggagtgaaaactggaataaatattaaatatgataacccaagagaagttggagcagatagaatagtaaatgctgttgctgcatatgaaatttacaagagaccagttataataatagactttggaacagctacaactttttgtgcagtaagagcaaatggagattatcttggaggatgcatatgtcctggaattagaatttcggcagatgctttatttgaaagagcagctaagcttcctagagtagaattagaagtaccaaaaaatatgatttgcaaaaatactgtatcaagtatgcaatctggtattatatttggttatattgggcaagttgaatatatagtgaaaaaaatgaaacaagaaatgaaaaattctaagtataaggaagaaccttttgtattagcaacaggtggattagcaaatttaatagctaaagagactgatgttattgataaggttgattcggatttaacactagaaggattaaaaatattatatgaaaaaaataaagaaatagagatttctcaaagataaattatatggaaattgagatttatacaagatgtaaggagtatattctacaatgaagatagggaatttaacctttgaaaacaatatatttctagcacctatggcaggagtaactgacatatcatttagaggattatgtaaggaaatgggatgcggtttggtttacaccgaaatggttagtgctaaggcattatattatggaagcgagaatacacaaaccttacttagaatagcagatgaagaaaaaccagttgcggcccagatatttggtagagagccagatgtgatggctagaatttgtgaggaatatttaaataacaggaaagatatttgtataattgatattaatatgggatgcccagctcccaaaatagttaaaaatggagagggatctgcattaatgaaagaaccggaacttgcatacgatatcgttagaactataaaaaaagtttcaaccaaacctgttactgtcaagtttagaaaaggatttgatgaagataatattaatgcagtagaatttgcaaaagggatggaacaagctggagcagatgctattgctgttcatggacgaacacgaaaacaaatgtatcaagggaaagcagattgggacataataaagagagttaaggacagtgtttcaattcctgtaataggaaatggagatgtattttctccagaagatgctatcagaatgaaaagaactacaaattgtgatggaataatgattgcaagaggaagtcaagggaatccatggatatttagacagataaataatttgcttaatggagaagtaattcaagaagtttcagataatgaaaaaattgaaatgtgcattaggcattacgaattagcaataaaatatgatggggaatttaaagcgataagagaaatgagaaaacacgcatcatggtatattaaagggcttccaagatgcacagaacttaaaaataagattaatactataaatgatagtgaaaaagttattgaagctttaagaaagtatcaagatgaattatagttttgtaagtataactagaattatttaattgtttcaagcatattattaatatttagaaaaatgcaatttggtttcataataaatctagtataaatatgagtattaatttttgcgtaaaaattataatttatgttttactaatttacttttatattaatatttaaactaggtttatttaatgtttgattcatagcaatcattgctatgagtaaagttgttccgaagtagttgctaactaatggagcgaattgcttcaaattaggatttattgacatatgaaatatgctgatttataataagttaaatgattttcagattaaaatattttttaaattattataaatttataggtactctctgttaacgatataataggagattgcttaaaaagatttatttaatagataatttatcaaaataaagattataatcaataactaaaataaataatatagaaggttttaaaggggagttaaagtatatgagccaatcaaaacaatatgttatgacttatgaaggtgttaaaaaattagaaagtgaattagaatatctaaaaacagtaaaaagaaaagaaataactgaaaagataaaaattgctttaggatacggagatttaagtgaaaattctgagtatgatgaagctaaaaacgaccaagcatttacagaaggaagaataattcaattagaaaatatgcttaaaaatgcagtggttgtagatgaatcagagattccaagtgatattgtttcagttggatcaaaggtaaaagttaaagattatgaatttgatgaagaagtagagtattcaatagtaggttcggcagaagcggatcctatgaattttaaaatatcaaacgaatcaccggttggaaatgcactagttggtaaaaaagttggtgatgtagtagaggtaacagttccagacggagttaataaattcgaaatactaggaataagtagaagttaattggaggtacagcaatgtcaacagaagaaatgagcatgcaagagttagagtctcagtataatgaacaggaaggattgagaagagctaaactagcagagctacaaggtgctggaaaggatccttttgatgtttataaagtcaacagaactcatacatcagaggaagttaaggcaaattatgatgcactagaaggtaaggaagtaaccgttgcaggaagactaatgtctaaaagagggcagggaaaagttgttttctcagatatacatgataaggatggtaagatacaactattcttaaagattgataaggttggggaagaaaatttaaagcaatataaaacttttgatttaggtgattggattgcagcaactggagaagtatttacaactaaaacaggtgaagtatcagtaaatgtaaatacttttgagttgacttgtaaatctttaaagccacttccagaaaaatggcatgggttaaaagatccagatttaagatatagacaaagagaagttgatataattacaaatacagaagttaaggatacttttattaaaagaagtaaaatcatttcagctataagagaattcctagatgctaaaagctttatagaagtagaaactccaattcttggagcaatagctggtggagcagcagcaaaacctttcattactcatcacaatactttagatatggatatgtatttaagaatagctacagagttatatcttaagagattaatagttgctggttttgaaaaggtatatgaaataggaagaaattttagaaatgaaggtatgtcagtaagacataatcctgaatttacagctatagaattatacgaagcatattctgattataatgacatgatggaaattacagaaaatatggttgcatatatttgtgaaaaagtaaatggaactactaaggttgcttatcaaggtacagaaatagactttaagccaccatggagaagaatcactatggttgatgctgtaaaagaatatgctggggtagatttcaatgaaataaaatctgacgatgaagctcaaactatagcaaaggaaaaacacttagaatttgctaaaccattaaatacagtaacaaaaggtgaagttttaaatgctttatatgaagagtttggtgaagcaaatatgattcaacctacatttgttacggattatccagttgaaatttcacctcttacaaagaaaaagagaggaaatcctgaatttactgaaagatttgaaggctttgtatttggtagagaactttgtaatgcatactcagaattaaacgatcctatagttcaaagacaaagattcgaacaacaagctaaagagagagaacttggagatgacgaggcatatatgctagatgaacaatttatgagtgctcttgaaacaggtatgccaccaacaggtggaatgggaatgggaatagatagacttataatgttcttaactgattcagcttcaatcagagatgttatattattcccaacaatgagaccacagaaataatttgatgcagttaaagtaaatagattatatttatttctataaaaaggttctatatgtataaaaagcatatatgaaccttttttttgttgagtaaaaaataaaatatagaaacataatttgaaatctggaattctataataagtccagaaatattttattagctgcataaatatttataggaattattattctctttggatgataagaaagaaaagccataggtatttctgaaaactgcaaaagtaaataaaatataaaaaaggcttgcataattagaaaaaactgatataatagattaagtaatgacgttccgcgatagctcaatggtggagcactcggctgttaaccgataggttggaggttcgagtcctcttcgcggagccattttttttatatttttttaggattatagtatgggctatggcatatatcttggaagtgttgctatagtttttttatttctaaattttataaagataaatcaggaatatataaggagtataattctaaaggcagatgctatttgatagttttgatagtatagagatataaatttgatattttgctaaaaaagggttgcataatttaaaaaagctgatataatagattaagtaatgacgttccgcgatagctcaatggtggagcactcggctgttaaccgataggttggaggttcgagtcctcttcgcggagccattttttttattttttttagaatagtattataagctatagcatgcattttgaaagcattgttatagtttttttttattccatatgaatttatactaaatttaaagttgtgaacattgtaactcttgagggcataagttatggaaatacttactcagagaatcacagtttgtaaagagaatgaaaaaatatattatgctgccgaattttttcacatacatttgaaaaatcagatgggtaaaaatctacagtcccacaatcgcttgagattttgttcttttaaggctctataaagatgaattaggaatatataatatgtattaattctaaaatgtagatgttatttgataactttgatagtatagagatataattttgatattttatcaaaaaagggttgcataatctaaaaaaactgatataatagattaagtaatgacgttccgcgatagctcaatggtggagcactcggctgttaaccgataggttggaggttcgagtcctcttcgcggagccatttttttatatttttttagaaaatattcagtcttgacatataaaatgattttgttaaaattaatttataaattaaatacacatgttgaaaaagaaaagtaatttataagtcagttgaagagagatgatgtttggtggaaatcattattggttataaatgaatggagcttttgagtgtgaggaaatcgatgaagaaagatgggcttaagccaagaagggtggaaccgcggaattatatttcgtccctttgtgcttaaagccttttttattttataaaaatatatttggagggataaaacaatggcagtagaaaaaacaatggataagattgtggctctttgtaaaaatagaggatttgtatttccaggctcagatatatatggtggtctagctaattcgtgggattacggtcctttaggagtagaattcaaaaataatgtaaaaaaagcatggtggaaaaaatttgttcaagaaagtccgtataatgttggattagattcggctatcttaatgaatagagaagtctgggttgcatcagggcatgttggaggtttctcagatccattaatggattgtaaggaatgtaaggcaagatttagagctgataaattagttgaagatcatatgacagaaaatggagcagaagtagctacagctgatggatggactaacgaacaattgaaagaatatattgaaagaaataacatagtttgtcctaaatgtggaaagatgaactacacagatataagaaagtttaatcttatgttcaaaacatttcagggtgttactgaagatgctaaatcagaaatgtatttaagaccagaaacagcacaaggtatttttgttaattttaaagcagtgcaaagaacatcaagaaaaaaagtaccatttggtatagctcaaataggtaaatcttttagaaatgaaattacacctggtaattttactttcagaacaagagaatttgaacaaatggaattagaattcttctgtaagcctggaactgatttagagtggcacaaatattggaaggactattgttggaatttcttgctaaacttgaatgttaaggcagaaaatttaagaatgagagatcatggagaagaagagttatctttctactcgaatgcaacttctgatatagaatatttattcccatttggttggggagaactttggggaatagcagatagaactgattatgatttatctaaacatcaagaacattctggccaggatttaagctatttagatcaaacaactaatgagaaatatgttccatatgttatagagccttcgttaggcgcagatagagttgctttagcatttttaattgaagcatatgatgaagaagagttagaaggtggagatgttagaactgtaatgcatttacacccagcattagctccgtttaaagcagcaatattgcctctttctaaaaagctatcagaaaaatctttggatatttatgcggagttaagtaagaaattcaatcttgatttcgatgaaacaggaagtataggtaagagatacagaagacaagatgaaattggaactccttattgtataacaatagatttcgatacattagaggatgagtcagtaacaattagaaatagagatactatggaacaagaaagaattaaaataagtgaaatagaaaattatatccaagcaagtttggaattttaggattatacctaaataaaaactgattcaagataatttcttcttgggtcagtttatttttttgttgcaagtgttataattaaaataacgaagaacaaattttggcaataatatatacgatggatagagatttgaatttggaggataaatcatgaagaaggattttaatgagtttaaagaatttatagtgggtaagaaagttggagttgttggaattggagtaagtaatattccgttaatcaattttttaatagatttaggtgctgctgtaacggcttttgataaaaagaatttagaagaacttggagatgttgcagatggatttaataaaaagggagttaagctggagcttggagaaaaatatctagataacttaaaagggtttgatgtgatatttaaaacaccatcaatgaggattgatagtgaagcattagtaagggctagaaaagaaggagcatatgttacttctgagatggaagagttcgttaggtatacaagaggaaaagtctatggaataaccggtagcgatggaaagacaacaacaacaacaattatttctaagttactagaaggtcaagggtataaaacatgggtcggaggaaatataggaactccattattttcagaaatagaaaacatacatgatgaagataaagttgtattagagttatctagctttcaacttatgacaatgactcaagaaatagatgttgcagtatgtacaaatttatccccaaatcacttagacatgcataaaagtatgcaagagtatatagatgcgaaaaagaatatctttatatatcaaaattcaaatggacttttagtagtgaatagggagaacgaaattacccatggatttataaaagaagcgaaaggaaatgtgaaagagttcagttcaaaaagagaactgatagatggagcatactataaaaatgggatactctatcttgaagacaaggaagtttgcaaaaaagacgatatcgtaattaaggggatgcataatgttgaaaattatcttgcagcatttttagcaacaaaagacgatgtctctgtggaggtaatgaaaaaagttgctgaaacatttgctggcgttgaacataggtgtgaacttgtaagagagatagacggagttaaatattataatgattctattgcttcaagtcctacaagaactttagcggggcttagagcatttgatgaaaaagtaatagttattgcaggagggtatgataagaatataccttttgaacctttagcatatgaggggtacccatatataaaagaattgatccttatgggagcgacaaagcacaagatcaaagatgtttttgataatttagaaaatgaaaaaggaattaaaattaatataaatatggttgagtctttggaagaggcagtaagacttgctgaaagcatagcgaatcaaggcgatattgtcactctatcacctgcttgtgcatcatttgacatgtatcctaattttatgataagaggtaataagtttaaagagatagtgaagtctttataagtgcataatgcaagaaataggagataagtgtttagttataaatacttatctcctattttgcattaacttttagaagaaaaatctttgaagtatatattattcacatttatacttgggctatagaatatacctgaggtagtcaaataatattcatttataccctctgatatctctggtttagaggtagcggttgaattttttaagtctactgatagtgagtataagttatttgagtcactgccgttaataaaatatatagatttatctataatttttaactgaaatccattcattatggaaattctcttgcagcttaatgtagatgggtctagtgagtatagattattgttatcagaagaattgaaaaaaagtaactgcccatcaaaaactataaagctattagctgtgtaatcggtaagtttttgtctattactaccatccgtttttattgaatataattttgagttatcacttaagttttgatacacaataaaatctccattaattataaaagagcctacactatcaggacataccaatgagtgttctgatgttgatgtattatatttgtaaatcctattttcgttatttttatttatgtagaataattctgaattagaagctattaaattatttactgaatcgtcattcaactttgtgtaagttttatcagaaatgttaaatgaagataaagcattattatctgaaccatttgaaaaataaatcatttgattaattaaggtcatattatcagcagaataatttgcaaaatcagtaacgctcttactttcgagaatatctttaggaaaaggagaaggaataattgaaattctattattctcatcgggatttggaaatattaagttgttaccattaaaaaggaacggacaaaagtatgaggagctactagttaagataaatgaattaggctcagttgcatccattgcttgggtattttgtacttgtattgatgttttggaagggggagctgtctgtgagttggatggcgaagcgatgttgcttgagcatcctataaaagaaaacatggtaaatggtaaaatgaaataaaaaattcctctattcataattaaaatctcctgaaactaaaattatatataatagtatttatagataaataggaataattaattattaagtaattaattctattctattctatattattaatattaaagtagattcctataacagtaaagacgttgttatatgtttttgcgggccttttatagaaaataattgaaacaatacaattaacacttccacgtgtgtcacatggtggaataatgagtatttattagaaaaaggcaggtatatgaattataattatttataacaatggatatgcaggtaatattgtatgaaaaacatgatatgattatattcgttgtcacgagtaattgatgaacaacagataagaagttagctaaaaagttttaaatgattataaaaaatattaaaaataattattgacaacgatagctaatgatgttatcataataaagcagtcaagtttgactgagagatctttgaaaattgaacagaatatgataaatacatttaagtaaaccagcaatttttatttgagtaagctaagattaaactttttattgagagtttgatcctggctcaggacgaacgctggcggcgtgcttaacacatgcaagtcgagcgatgaagttccttcgggaatggattagcggcggacgggtgagtaacacgtgggtaacctgcctcatagaggggaatagcctttcgaaaggaagattaataccgcataagattgtagtgccgcatggcatagcaattaaaggagtaatctgctatgagatggacccgcgtcgcattagctagttggtgaggtaacggctcaccaaggcgacgatgcgtagccgacctgagagggtgatcggccacattgggactgagacacggcccagactcctacgggaggcagcagtggggaatattgcacaatgggggaaaccctgatgcagcaacgccgcgtgagtgatgacggtcttcggattgtaaagctctgtcttcagggacgataatgacggtacctgaggaggaagccacggctaactacgtgccagcagccgcggtaatacgtaggtggcaagcgttgtccggatttactgggcgtaaagggagcgtaggtggatatttaagtgggatgtgaaatactcgggcttaacctgggtgctgcattccaaactggatatctagagtgcaggagaggaaagtagaattcctagtgtagcggtgaaatgcgtagagattaggaagaataccagtggcgaaggcgactttctggactgtaactgacactgaggctcgaaagcgtggggagcaaacaggattagataccctggtagtccacgccgtaaacgatgaatactaggtgtaggggttgtcatgacctctgtgccgccgctaacgcattaagtattccgcctggggagtacggtcgcaagattaaaactcaaaggaattgacgggggcccgcacaagcagcggagcatgtggtttaattcgaagcaacgcgaagaaccttacctagacttgacatctcctgaattacccttaatcggggaagcccttcggggcaggaagacaggtggtgcatggttgtcgtcagctcgtgtcgtgagatgttgggttaagtcccgcaacgagcgcaacccttattgttagttgctaccatttagttgagcactctagcgagactgcccgggttaaccgggaggaaggtggggatgacgtcaaatcatcatgccccttatgtctagggctacacacgtgctacaatggctggtacagagagatgctaaaccgcgaggtggagccaaactttaaaaccagtctcagttcggattgtaggctgaaactcgcctacatgaagctggagttgctagtaatcgcgaatcagaatgtcgcggtgaatacgttcccgggccttgtacacaccgcccgtcacaccatgagagttggcaatacccaaagttcgtgagctaacgcgtaagcggggcagcgacctaaggtagggtcagcgattggggtgaagtcgtaacaaggtagccgtaggagaacctgcggctggatcacctcctttctatggagaaatctagatcagcatgatgtctgactagtatagatgcataataatgtatcaaaatttaaatacttgctcaaaggttacttggagtagttattctgttcaattttgagggattttccttcaaaaagcctcatgggggtttagctcagttgggagagcacctgccttgcacgcagggggtcaagggttcgaatcccttaatctccaccatgagggcttatagctcagctggttagagcgcacgcctgataagcgtgaggtcgatggttcgagtccatttaagcccaccaatgttctttgaaaattgcatataatttaatgtatataaaatacaacaaagccaagaaatatattctttgtaaatgattaatataaccagttttgtactaacaaaacttaaaaggtcaagctacaaagggcgcatggtgaatgccttggcatcaggagccgatgaaggacgcgataagctgcgataagcttcgggtagacgcacatagtcagagatccgaagatttccgaatgaggaaactcacatgggaaaccccatgtatcataaagtgaatacatagctttatgaaggtatacccagggaactgaaacatctaagtacctggaggaagagaaagaaaaatcgattttcttagtagcggcgagcgaaaaggaaagagcccaaaccagagatttatctctggggttgcggacagaacataacgagaaatcatagttaattgaacacaactggaaagttggaccacagtgggtaatagtcccgtaagtgaaaactatgataatcagttctgcaccagagtaccacgagacacgtgaaaccttgtgggaagcagggaggaccacctcccaaggctaaatactacctgatgaccgatagtgaagcagtaccgtgagggaaaggtgaaaagaaccccgggaggggagtgaaatagaacctgaaaccatgtgcctacaaccgatcagagcaccttatgtgtgtgatgatgtgctttttgtagaacgagccaacgagttacggtatgtagcgaggttaagtacttaaggtacggagccgaagggaaaccgagtcttaatagggcgactagttgcatgctgtagacccgaaaccgggtgacctatccatggccaggttgaagcgagggtaaaacctcgtggaggaccgaaccacgttgctgttgaaaaagcatgggatgagctgtggatagcggagaaattccaatcgaactcggatatagctggttctcctcgaaatagctttagggctagcgtcggaaaatgtgagtagtggaggtagagcactgaataggctagggggcatagcgcttaccgaaccttatcaaactccgaatgccacatactatcagtccggcagtcagactatgaaagataagttccatggtcaaaagggaaacagcccagatcgtcagctaaggtcccaaagtgtaagttaagtggaaaaggatgtgggatttctaagacaactaggatgttggcttagaagcagccactcattaaaagagtgcgtaatagctcactagtcaagagatcctgcgccgaaaatgtccggggctcaaacttaccaccgaagctacgggttcacgtttaacgtgagcggtagaggagcgtcgtaatcgggctgaagtcgtaccgtaaggagcggtggactgattacgagtgagaatgttggcattagtagcgagatgtaggcgagaatcctacaggccgaatatctaaggtttcctgagtaaagtttgtcttctcagggttagtcgggacctaaggcgaggccgaaaggcgtagtcgatggacaattggttgatattccaataccactataatcgttattatcgatggtgtgacggagaaggataggatgtgctagctattggatgctagtctaagcgtttagggagttgggattggcaaatccgttccaacaattctgaggcgtaatggggaaggttctacggaaccgaagtatctgattccatgcttccaagaaaagcatctagagagagaagtagtgcccgtaccgcaaaccgacacaggtagatgaggagagaatcctaaggccgacggaagaattgcagttaaggaactaggcaaattgaccccgtaacttcgggagaaggggtgcctgagaaatcaggccgcagagaataggcacaagcaactgtttaacaaaaacacaggtctctgctaaagcgaaagctgatgtataggggctgacgcctgcccggtgctggaaggttaaggggaacacttagtggtaacgcgaaggtgtgaacttaagccccagtaaacggcggccgtaactataacggtcctaaggtagcgaaattccttgtcaggtaagttctgacccgcacgaatggcgtaatgacttgtgcactgtctcaactgcaaatccggcgaagttgtagtgcgagtgaagatgctcgctacccgcgattggacggaaagaccccgtagagctttactgtagcttagcattgaatttcggtattgtctgtacaggataggtgggagactgggaaactagggcgtcagccttggtggagtcgttgttgggataccaccctgatagtattgaagttctaactggatgccatgaaactggtgacaggacattgttaggtgggcagtttgactggggcggtcgcctcctaaaatgtaacggaggcgcccaaaggttccctcagaacggtcggaaatcgttcgaagagtgtaaaggcagaagggagcctgactgcgacacctacaagtggagcagggacgaaagtcgggcttagtgatccggtggtacctcgtgggagggccatcgctcaacggataaaagctacctcggggataacaggctgatctcccccaagagttcacatcgacggggaggtttggcacctcgatgtcggctcgtcgcatcctggggctgaagtaggtcccaagggttgggctgttcgcccattaaagcggcacgcgagctgggttcagaacgtcgtgagacagttcggtccctatccgtcgcgggcgtaggaaatttgagaggagctgtccttagtacgagaggaccgggatggactgacctatggtgtaccagttgtttcgccagaagcatagctgggtagctaagtcgggaagggataaacgctgaaagcatctaagtgtgaagcccacctcaagatgagatttcccatagcataagctagtaagaccccttgaagactacaaggttgataggtcagaggtgtaagtatggtaacatatttagctgactgatactaataggtcgagggcttgaccaatataatcaagttgtaatatacattgaaattatatgcaattttgaaagaatagtatttctttcaaaagaaaatctcgtaatgatggcatagaggtaacactccttcccattccgaacaggaaagttaaggtctattacgctgatggtactgcatgggagactatgtgggagagtaggaagttgcgaggtaagatggctcgatagctcagtcggtagagcagaggactgaaaatcctcgtgtcactggttcgattccagttcgagccaccataatggcgctatagccaagtggtaaggcagaggtctgcaaaacctttattccccagttcaaatctgggtggcgcctccaatttatttaagatagcttatgtattaactaaatagttgatacataggctattttttatgtatataataagctttatggaaatctataatttaaaattgaattaattacatagaaatattataagttaatgagtcactaatagagtgaattaatgaattatatataacatgacatggttgcagtgattacgtttttatatttaatcggattgcagtgaataaattgatttactataattgcaaatgtctactattatcataactatatattaaataaatttttaaattactttttaaattactttttaaagtttattgaaaaaggtttcaaagagtgctatactaaatttaaggaaaataaatattgggtacctatttttctaaaagctaatatacatgcatgcattattagattattaatagaaggtatatttatctatatgataaatatgaataaaaactagtacagcattatttaaagaatgtaagagcaagttagcatttctagttatttttaccaagatttcatggaagtcaaattataaatatactgggcaattaatgtatcttttgtaaacgataaaagtagtcttccgaacgaagaaattttaggaatattataaacgcactaggaatatacgaatttaaatcaaatgaaataaaaaatgggagatgattttaatgaaaataaaaattagtaactctgtaatatatattttcgctgcacttagtgggcttttgtttggttatgatactggagttatttcaggagctattttatttattcaagaacaaatgcaccttgattcatggcagcaaggatgggttgtaagttctgtattattaggagctattcttggggctgcaatcattggtcctatgtctgataaatatggccgtataaagctaattcttacatcggctgttatcttctttgtcggcgcacttggatcagcatttgctccagaaatttggtcattaattatatttagaatcattcttggtgtcgcagttggtgcatcttcagctctaattccaacttatttagctgaattatcaccatctgaaaaacgtggaaccatatcaagtttgtttcagctaatggttatgagcggaattctattggcttatattacgaattatgcattttcagatttatatactggttggcgagtgatgttagggttcgcagctattccagcagcagttcttttaataggtgcacttgtgttaccagaaagtcctagatttttagtaaaagatggacgagcagatgaagcaagaagtatactagaacatatgaataaacatgataaaggtgctgttaattatgaattagctcaaataaaaaaacaagccgagattaaaagtggtggagttaaagagctatttagcgaatttgtacgcccggcattagtcataggctttggtttggctgtttttcagcagattatgggttgtaacacagttctttattatgcaccaactatatttactgatgttggatttggggtgcaagcagctttactcgctcatattggaattggagtttttaatataataattactgctatagctgtagctattatggataaaattgatcgtaaaaagatgcttatttatggtgctattggaatgggcgtttcgctcttgattatgagtatttcaatgaaattctctaatggatctttcgttgcctcaatcatatgtgttattgcattaactatttacattgctttcttttcagctacttggggacctgtaatgtgggtcatggtaggagaagtatttccattaaatattcgcggcttaggtaattcattcagtagtgtaattaattggagtgctaatatgatggtatcattgacatttccagtattattgaattactttggtacaggtagtttgtttataggttatggtgtaatatgttttgcagcaatttggtttgttcagtctaaggtatttgaaacacgtaatcgttcacttgaagatatagaagctgaacttagatcatataaaggagtagaaaaactccaaaaggatatctgcactcaagatgctacaactaaggcttaggtgataagagtagttataagatattataaaaaagatatgttagttaaacatatcttttttatataatataaaggcaacaagtccacaaatgccaacagttacgcccataactatagagaatgcatgtggattatctgcagataatggtaatgctatattcataccaaatattccacctattatagtcggtattgccataagaattgtaactgatgcaagtactttcataacaatatttaagttatttgatatgacagaagcaaaaaaatccattgtactagctaatatattactatagatttcagtcatttctatagcttgtttattttctataattacatcttctaaaacatctttatcttcttcatatttttgcataagctctaatttcagcattttctctaaagtaatttcattagcctttagtgaagttgaaaaataaacaagtgatttttccagagaatgtaattgtataagctctctatttttcatagatttatgaagccttttttcaatcattaaactttttttatctatttgacgcaaataaagtaaatagtatgttgatattctatttagtatttgtaatgtaaatcttgattttttaaatgtataaaaagatttaattttgttattagcaaaatccgttaggattttactgttttttaagcatacagttatcaattgtttattagtatgtattattgataatgggtatgtatcataagtaagagagttatcttccatttcggtaaacggtatatccactattattaataatgaatcctcttcaatatcgatacgtgaggtttcttcatcatctaaagctgcttttaagaattccaaagggacacctgttttctttgatattaatattagttcctcagcagatggagcaataagatttatccaagcaccattttctatcgtatctattaattttagggaaggatcaaattcactttcgcttttatagatttgaatcaatttataacacctcctaagcagtacaactaatattatactattataagatggtttgtaaacacatagcatttcttgtaatatactattatttttattattctgtaagtttaatatgaaaatacatcaaagtattttacgtttgattttttattatgccagaatctatgaagtgaaatatggtatcttaaaatataaatcgatataatatatggagtttattattatcaaaagcatatattatattatttttaagataccatatcttaaaatttttttattagcaatttctattattaaagaattcagacttaacttcagagagtaaagtttcgttttgtatcaagtcaatagcagttaatgcaagagctgtagctgctatattgcattgttttaaagcaaattcagatgtagttgcttttgcgaaatctaggcttccatatttaatattttcatcatctattatagatatatatggatgtatgcaaggaaccttatgacttacatctccaatgcttaatccagcatatatatcctttggtggattaatatttattattccactttctttaaggttatgactaaatagcctatttagtgttctattggttattaactccttattaggagactcatataagaaaaatttattaggaatatctattaatgctgtcacattatgtgcaatttttcttattttatcataagcttcgttagcagttttcgtgttggatgcacgaatgcaaaatttaatttcagaatctgctggtaatagcaatgttgtatacccaccattagatataaccgaatttatttctaaattatctggaaatcctttttttatagagtttaaaatattaagagttagtaaaacggcatctaatgatgtataagaattccgatttaaaaaactcaacttgctttcgctttcaaacttaagtcctaatgggataattgctgatgaagagccactttcacatgtacatgtgtcagggtgtgctaccattacaacatctatgtcatcaaatagtccttgttttaccattgtccctttagtcccgccaaagtattcaccggggcaacctaccagtattacagaacctccgatgtcatctataacacttcctaaagctaatgtagcggatactgacattgcagtaatcatattatgcccggtaatatgaccttcattttcgatagcatcatattcacatagataacatattttaggatgaccttggcctttctttgctataaatgaattgttaatgtttaaaaaatttctatcaacttcaaatttgtatttatttaataaattgcatatgcaattagacgcgttaacttcactataacttttttcgggattctcatataaataggtacagagatttttaatatcgtcagcacaagtagataaaaatgaaataattttgtttttcataagcgcaattccttacttaaaacttgcaaaataaattactagatcttgtatatagtacaggttttgctttgttttacagtaagttctcctttcatattaatgtttttattgttaacatgataatagctgtattaaatataagcttaatatagctatcattttaaatattatgagcaaattattgtttgaaaatttaataatataagctatttttgcaagctatatttacattatgtaatttgtattaaattcagtagtaattgtgtaaatatatattgctctttattagtattaccataaattaaaaaaatatctatatagaagttattaacatccacaaggtgtataaagtctacataattggtaataattttataggaatcataaaattaagggggaattactaatggaggatacaaataaatcatgttttttatgtggagcaagtgattgcgatggtataatattaaatggagaaaagatttgtaaagcatgtgaagagaaaattgttaatacaaatgtagaggatccagattatgattattataaggataatgttaggataatcttatttagcgaacatgcttagaaattaaattcttacatttaaacgctaatatacagaggggtactttaagatgaaaaaaggtttatttatagtttttgaaggtggcgagggaaccggaaaaacaacggcgattgacgcaatatatgattggattacagaaaataattttgaatgtataaagacgagggagccaggcggaattaaaatatcagagcaaataagacaagttattttaagcaaagataacaaggagatggatgctaaaacagaagcactattatatgcagcggcgagaagacaacaccttgtagaaaaagtgataccagcattgaatcaaggtgtaatagttctttgtgataggtttatagattcttctttggcgtatcagggttatgcgagaaatttaggaatagaagaagttttaagtataaataaatttgctattggtgagtatatgccggatatatcagtgctatttgatcttgatcctaaaataggattggctagaatagctaataatgattgcagagaagtaaatagattagatatagaaaagttagagtttcatgaaagagttagagaaggatatgatattgtttataaaaataataatcatagaattgttaagatagatgcaaataatacgaaagaaaatgtaattaatcaaataaaaaatatactaagacctaaaatatggacaaatataaagtaagtaataaaaagccacctatttgtggtaaaataatatgtagtaaattattattagtttaagggtgggaattaaaatgaaattgataattgcaattgttcaggatgaagattcagcagatgtcatagaggctttaacagaagaggattatagagttacaaaattagcaactacaggaggatttcttaaatctggtaatactacattattggtaggaattgaagaggaaaaagttgaacttgttattgatgttattaggaatgtatgtagaaagcgaaatgagacagtagtcacaccaactacccttgggggaagtgaaagtggatatatgcaacaatacccagtgcaaattagcgtgggaggtgctactgtattcgtaattgatgtggataagttcgtaaaaatatgatatcaaggagagataagcattgagaaagataatcggacataaaaatattatcgataatataaataatagaagacaaaaggattcattttctcatgcaaatctaataattggtaatgatggaataggaaaaagtatagtagctaagtatctttcaaaccagattattaaagagagaaatggtgtagagagtgttgatattgtaaggtattctcctaattccaattcatttggtgttgatgatgtgagaaacattataagtgaagtcaataaaaagccttatgaaggtgataaaaaggtattaatattatataaatgtgacaagctaacagttcaagctcaaaatgcattattaaaaactattgaagaaccaccaagaggtgtacatttaatattactaagtgattctttagaagtaattttagatacaataaaatcgcgttgccaaatatataggttaacaccattaaataaagaagaaattttgagttaccttgaggaaaaatataataatttaagtgaagatgataaaaaagctgcattagcttatagtgctggaatacctggaaatgtagatagattttttagcgatgataagttgagaaatttgagagatatatgtatagaattatttgaagatatcgtaagtagacaaaaaggtattatattaaagtatgaagaattattaaaaagtgcaaaagaagataaattagagttactaaatatacttctatcatatataagagatatcttacttcttaaagaacttaatgatagtgaactcgttgttaattttgataaaatatataagataaaaaatatatcaagaggaatatcttataagaaattaaatagtatgttagaatacataaaagaagctagaataaattttaatagtaatacgaactattcaatggtcataagtgttttgcttatgggctttgcggaggtataattaatgataaaagttataggcgtaagattcaagaaggcaggaaagatttactactttagtccattagaattggatataaaaaagggcaattatgtaatagtagagacagctagaggtatagaatttggtgaatgcgttataggaattaaggagataaaagaggaagatatagtatcacctttaaagaatgttattagaatcgctgatgaggatgatattagaaaacataaagaaaataaggataaagagaaagaagccttagatatatgtttagcgaaaattcaagaacataaattaaatatgaaattaatagatgttgaatatacatttgataatcataaggttatattctactttacagcagatggcagagtagattttagagaattagttaaggatttagctactatatttaaaactagaatagaattaagacaaataggagtaagagatgaggctaaaatggttggaggacttggaccatgtggcagacctatgtgctgctctacattcttaggagactttgcatctgtatcaataaaaatggcaaaggaacagaatctttctttgaatccaaccaagatatctggaatatgtggaagattgatgtgctgtttgaactatgaacaaactacatatgaaggtataagaaagagactgcctaaggtcggttctattgttaagatagaggctgggaatggagaagttgttggtaattcaatagttaaagagatggtaaaggttaaggttagaagaggagacgaggaagttgttgaggaattcaaaataactgatgtagagctcgtttcaggaaaatatgaagatacaattgatgaaaataatataaaattgattgttgagtcagaagaagataaaacattaataaaaaatcttattaatgaaaaataggaggaatttctatgaaatctgttattaagatttgtaatatggagtctaatgacgatgccaagataattcaagatacagttgttaagaattctggggtaatagctactgaaatttcgcttgcaaaaagggagataacagtaatatataatgatatctttttaaaactcgaaaggattataaattctatagaggatttaggatatgttgttttgtaatcttaaataatagaacaatattaaaaaataagaagtctaaaatacaaaacactttaaaaacatacgaatacgtgttaaaatgtaagaggttaattaccacaatttattaggaggtgttctagatggcatttgttattaatgattcatgtgttagctgtggagcatgcgctggagaatgtccagttagtgctataactcaaggagatactcaattcgttatcgatgcagatacttgtatcgattgtggaaactgtgctaatgtttgcccagtgggagctccaaaccaagagtaataaaagagagatcgtctttaggcggtcttttttttatttaaaaataggtattttcactatttatatggaggggttaacaagatacattcagacttaaggttagaatttatatccaagtcagaagtatctaatatattagaatttattttttttacgctcttcatagatattataaaattcttagggtcgtctaagtataaagatgttgtattagttttataatgcataggaactatgtattttggggaaataaggttacaaagtttcgcagactcaaaaccgtcgagagtgaaatgtccaccaatagggataagtaaaatatcaatatttttaagcttttctaaaatcaatgaacaaggtatatggcctaaatggcctaaatggcatatggaaagtttatcatccttaaatatataaataatatttgagcctctttttagtccattgcacttatcatgaaaggagtcaaacccttctatgttaaggaagcttaagttaaagtttccgctctcattaataatcttggttgtattatttatatcattaatatatgaactatcaaaatggttatgactaatggtaattaaatcagatttagggaaattattatcataacctaaattgttgctaaatggatcaattagaattcttttaccaatggatgttttcataaggaaacaagaatgtccataccaaataatttgcatataaaacctccataaattgaaatatattagatattattaacatacagtattataaataatcataaatttatattgatgcttcaaaaagtaaaaaaagtatagtataatattataaagtcaaagtaagtcaaaaacaaataattaaataaaggtttaagcaggtgatgttatggcaagactttcagatataatagaagagtttataaaacaaatgtttaatgagaatagagataatgtgatttttatacaaagaaatgagttagcagatcagtttagatgcgcgccgtcacaaataaactatgtattaacaactcgatttacctatgaaagaggatatttaattgagagcaagagaggcggcggaggtcatatagcgatcaagcagttagatgatgataactccaatagaagggaagaattaattaaccaaagcataggagaaacaataacatatcataatgcaaacgcattgcttaatcacttattagaatctggagttattgaagaaagagaatgtgaaataatgaaaatagcaataaatgatagaagtttaacttcagcagataataaaaataaagtaagagctgatattttaaaagctatgattatgataattttatcttaaaggtggggatatatatgttatgtgaaaaatgtaaaaaaaatgaagcaaagataaatttaattacagtgatgaatggtcagaaacaagaaatttggttgtgtgaaaattgtgcaaaagatatagctaatattccgttctttaatccaataatgcaaaatataaatgttccatttcaaggcatacttacagaaatattatctaatgtagataatggtaaatcaaatatagataataataaagtaaaggaaattatttgtccaaattgtgggttaacctatcaggaatttaagaaatcaggaagattgggatgtactgattgttataaagaatttaatattgtacttgagccaaggataaagagcttacaagttggaagtaaacatattggtaagattcctaaggtaaagggaaaggaattggttcaaagaaaaaatcttaaggatttaaaagaagagatgcaaaaattgatagtagcagaggaatatgagagagcagcaatagtaagagatgaaattaaaaaactagaattatatatattagaaagtaacactaaggaaattataaatagaaaggagggcaattgtgatgaatagctgggaagatgataaggaaagatttggggcagtattaagtagcaaagtattgttagctagaaactttagtaatttaccttttcctaataagctaaactatattaagggtagagaaaatggcaaagaagtatataacgttcttaaaaacgaattggataatgaagaaattacgttatatgagatttggaatacaaaagaggaatttagtaaacaatatttagaaagggatctaattagcaaagagcttttgaaaaattctgataagggctcatttatattgaataaagaagaagatcttagcattatgataaatgaaaaagatcatataaatcttcaatgtgtaagtgatggattgaaattagaagaaatttttgagagagcaacagttattgatgataagatagaagaaaattttgactatgcttttgatgaaacattaggttatttaacagcatcaccagagaatatcggaacaggaatgaaggcctcagtagtattacatttgccagctcttagtatgagtgaagaaattaataatatatccaaaaggcttggtaagttaggaattgctataaagggagttcatttagatggtacaaaggtttttggaaatttatacagaatatctaataaggtgtcattaggtttgacagaggagaatattataaataaattaaaagaagcagtttggagcataataatagaggaaaataaattccgagaaatattacttagtaaatgtagacatgaattagaggataagatatatagagcatatggaatactgaaatatgcaatgattttggattttaaagagtctattgaactattatcaaatgttagattaggagcggaattatcaattataaatattgataagggtaagttagataaactatttattctaattactaattcatcccttcaaaattatttgaaaaaatcactagatgataaggaaattaagtatgaaagagctaaattagtgaaagaaatgttaacctaaggagaagataggaggtttaaagtatatggaatataataaattaacagaaagggcacaagcagtaattttagaagctgaaaatgaatcagaaaaatttaaacatgggtatgttggaactgagcatatattacttggcatattaaaagaagatggatattctgctaagttattaaaaaaatatggggttaatattgagaatattagaaatatgatacaaagatacttgggttatggggatatcaagaaaacagacgataatattttactgacccctcggaccaaaaggttaatagatgaaagtttcgcagcagcaaaaagattaaatcataaatatgttagccctgaacacattttattggccttacttaatcaagaagaaggaatggcatacactatcttaaaaagcttgaatcttaacttcaccattataagtgaagaattacttgtattcttatctggtacttatgaagataaagctagcgataaaaatataattgataataagaaagctaatactccaatgcttgataagtatggaagggatttaacagtactatctaaggaacaaggactagatcctgtaattggaagggataatgaaactcaaaggttattagaaattctttgtaggagaattaaaaataacccgtgtctgattggggaaccaggtgttggtaaaactgctgtagttgaaggactagcacagagaatagtggagggaaatattccagagatacttagaaataaaagagttgtttctttagatttaacatctatgattgcaggagctaagtatagaggtgaatttgaggaaagacttaagaaaactatggatgaaataattaaagataaagatataattatttttatagatgagattcatactattataggagcaggaggagcagaaggtgctatcgatgcatctaatatattaaagcctgctttagcaagaggagagattcaatgtataggagccacaactatagatgaatatagaaagtatattgaaaaggattctgcattagaaagaagatttcaacctgtaacagtgggagagccttcaaaggaagaaacgctaaagattcttaaaggattaagagataaatatgaagctcatcacagagttgaaataacagatgaagctttagaagcggccgttaatttggcagataggtatataacagatagatttatgccggataaagccattgatttgattgatgaaggagctgctaaagtgagaatccaaagtttaacagcccctccagatttaaaagatttagaagaaaaaattgaaaatataggtaaagaaaaggaagaagctatacgagttcaagactttgagagagctgcgaatttaagggataaagagagaattttaaaagagcagttaggtaatatgaaagatagttgggatactcagaattctataaagacactagttgtagatgcagaaaagatagcgagtgtagtatcatcttggactaagattccaattcaaaaattaactgaatcggaaagtgaacggttattaaaattagaggaaatactacacaagagagtcgttggacaaaatgaggcggttaaatctatagcaagggctgtgagaagggcaagagttggaataaaggatcctaatagaccaataggaagctttatatttttgggaccaactggagttggaaagactgagctttctaaagcacttgcagaagctatgtttggtgatgaaaataatattataagaattgatatgtcagaatacatggaaggtcattcggtatctagattaataggatcgcctccaggatatgtaggacatgaagaaggtggtcaacttacagaagctgttagaagaaaaccttattcaatagttcttttagatgagatagaaaaggcaaatccagaggtattcaatatattgcttcaaattatggaagatggaaggcttactgatggtaaaggaaaaatagttaattttaagaatacaataattataatgacttcaaatgttggggctcatcaaattaaaaagcaaaaaagcataggatttagtagtgttagttctaaaaacgaaaatgaaactgaatatgaaaagatgaaggaaaatatattaggggaattaaagcaaaaatttaggccagaatttttaaatagaatagatgatacaatagtattccataagttgagtgatgaagatttaaatcaaattatagatttaatgcttgcatcaataagaaaaaggcttgaagacagagatatatacttaaactttgaagataatagtaaaaggttcctgctaaacaaaggaattgaccttgattatggtgcaaggccacttagaagattaataataaaagaggtagaagataaattaagtgaggaaatattacaaggaaatataagaattggagatagggtaaaggtaagtgagttagaaaacaaacttattttcaaaagattggctgaaagcaatttggagctcaataagaattaatttatgttaatgggctatttcaacgctataaattatttatacattgaaatagtctgtttagtttaaagattaatataatatttgggtattgagtagtttaaaatgtattaaatattaggagaaaatagatatgagtaaagaaaagaaagaattagatttaattataattgggggtggaccagcaggtcttacagcagcaatgtatgcaggaagggcaaagttggatacattgttgttagaaaatgaacttgtgggaggtcaagttagaaacagttatactatagagaattacccgggatttaaaagtataggtggaggagatttagctgacatatttcaagaacaagctagagatcttggcgcaaatattgatgaatttgattcaattgaaaagatatatatatcagatgatgaaaagattatagaaactgaatcatatgtataccaacctaaagctgtaataattgctacaggagctgcgccaagaaaactgcctattcctcaagaagaacaattttcgggaagaggaattcattactgtgctatttgtgatggagcactttatcaaggcaaaaaagttgctgttgtaggcggcggaaattctgcactagaggagtctatatttttaactaggtttgctgaaaaagtgtacttaataagaaggtatgattattttaaaggagaacagtcattaattgatgaagttttcaataatcctaaaatagaggttctattaaataaggatttgattcaagccaatggtaaggaatttttggaatcagttattataaaagacactaagactcaagaaagtagtagcttagatgttaatgcagtttttggatatataggaacagagcctagaacaaaagaagtaaaggattatataaaattgaatgaacaaggatatataattaccgatgaagatttacaaacaaatattcaaggagtatatgcagcaggggacgtaagacaaaagaagtataggcaaataacaactgctgtatcagatggtacgattgcgcttttaaatgcagaaaaatatatattacgaaaaagaaaatagcattaaagatgagaatataaatcagatattaatttatataagccaaaataaaagaggcggatatacgcctcttaattatttacctaaagcctttagaatagcaggcttatcaaagcctataataatattatcattaatatctaatactgggacacccatttgattagatttttttatcatttcttctctagcttccatatcatcttgaacatttaattcttgaaattcaatgttctctgatttaagaaaagtttttgctttaacgcaccaaggacaagtattggtagtatatacttttaccataaatgaatacgcctccttaataatagttattatattgtaattaatattataatatagattttataatcattcaatatagctagaaaataatgatgtttattatcaattaaattataacttggttatatattgttgtctcattattagaataatcattatagagtaatttagttaatacataactggtgaattatatattatatttattttctagtgttgatattaatattataatttctatattattatatatttgttctttactaatctattttataatagcttttgcaataatttattaaatattctaagaacaaaaaataaaatagttataaagtgctatatataataattgattgaaggctaagcactagctatatttaattcaaaatatatgagtaagaaagtaatatgctataatgtaattaatattattattaaaaaagtaagatgtaataaagatctagaaacgaagggagaggtttatgaagaaaaaaacattatatagatgtaatagttgtggttttgaaagtataaagtggcttggtaaatgcccaacatgcaataattggaatacattagaggaaattactattgaagcaaaaaatttagagactagatccagacaagtagcaaaaaaaccgttaaaaaaacttttggatatagtttccaacaaaagcgatagaatagtaacagggataaatgaatttgatagggtcatgggtggaggaatcgtaaaggattcaatttcaattataacagcaagaccgggagcgggaaaatcaacacttcttcttgaaatttccgatgctgtcgcccaaaagggatataaagtaatttatgcgtcaggggaagaaagtgatagtcagataaaaaacagagcagacagaattcttaataaaatccacgaagatatatgggtactacaagaaacaagtcttgataatgttttagatgcagttgaagaaatagatccggatattataataatagatagtatacaaacatttactatggaatcatctttgccagcgagagcagggtcacctacacaaactatggaatgtgctaatgcattgctccaaatggctaaaaacgatagaaggccaagagcggttataatagttgggcagatgactaaaagtgatgaacttgcagggctaagagccttagaacatttagttgatacggtgcttataatagaagatgatagtgatgaagagttaagagtacttgtaagttctaaaaatagatttggtggtattgaaaatggcttctttcaaatgggggagagagggattatttcaatagataacccctcagaattcttcatgacaaagcgtgaagaaggagaaattgtatcaggaagtgcattaacagtaattaaagaaggaacaagagcaataataactgaaatagaaagtttagtgtcgaagagttttactccgtatcctacaagaataggggaaacattaggaaaggataaattaaacactttgatatctatacttgaacaacgtggaggaattaatttatacgataagaatgtaattattaaaactacaggtggtataaaaataagagaacagggcattaatttagctgtaataatgagtatagtatcctcagtaaagcagcaggggatagaatcaaatatagcgtttatagcagatgtaggactgactggggaacttaaaaaagtaccatcattagaaagtaggattagggaacttgagagaatgggatttaaaaaggtttatgttccaaaggattctataggaaaaagcagtaacttaaagaaaatagatataattgaattaaagactttgatggatgtaataaataatatttatagaagctagaacattatagaaattccatattaaatatgaagaggatagagctatttcttacaaataaatatattataacttaaatttaacaaatgttgttgagggattatatttattatagtattatagtttctagagcctaggttaaatttactcggaaaataatatcagtcaaaatgtttaatatttgattttaaatagatctagaaaagtattaaaatgatttttaaagaaaatgggtgagtgtatgagaatagaaaagggaataggaataaagaatgtcttaaagataatgtgcccaggcactcaactaagggaaggtcttgaaaatatattaagagctaaaacaggtggattattagtgattggtgacgatgaagaagttatgaaactcgttgatggcggtttttatattaattcagagtatacaccatcatatgcatacgaattagctaaaatggatggagctatagtcataactggagacttaaagaaaatcgtttgtgctaatgcgcaattaatacctgattcatctattccaacatatgaaacaggaactaggcatagaacggcgcatagagtagctaagcaaacgaataacatagtaattgcaatttctcaaagaagaaatataataactatgtacaagggtgatataaagtatgtattaagagaaagtagtgtaattcttggaaaggcaaatcaagcacttcaaacactagaaaaatatgttgcagtacttgaacgtgttattaataacttgaatttattggagtttcaagacttaacaacactattcgatgtagttacagcaattcaaagaactgaaatggtaatgagaatagtggaagaaattaatatgtatatactagagttggggaatgaaggacgattaatatcaatgcaattaaatgaattagttaagcatatagaaagagatggaatattgctaattagggattactgtaaagatggacttcaatataacgaggtatatgagcacattcaaaaattaaattcttcagaattattagaattagacgcagttgcaagaacattaggtcgtggaggaattccacttatggatacattaatatctccaaagggatatagaatgttgagtaaggtgccaagaataccatctaatgttattgataatcttataaaagaatttgaagaattaagtaatataattgatgcggatataaatgacttagataatgttgaaggaataggagaagctagagctactgccattaaagatggattgaaacgtataaaagagcaagtttcattaaaaaaggaaatatgataattaaatttgtgttaaattaaataggatttagtttttacaaagaaaataccatttatttagatttattgatctaagatttaagttgattcttcaaagtagaatgaaattattagtaaacttaataatttattcattttagaggtacttattgtatgatataattaatatgatttagagaaatgttgaaaaaatgattaaaatactatctaattgtaaataattagaaggaggtgaagtatgtgttaaaaagactattaaggggaattttttctgtaattggattgatactaggatatttcatatctgaaatattacttacaatccctcaggttgataatttaacttacatttcaaccactattactagagttttatttattattattatatcttttatctttggacttatattttatattatttctcctattatatacaaaggaatttctaatttaattgagtatattgaaaagagtatgcaaaaaatgagcataactgaaatcatttatggaacttttggagctgtaattgcgttaattcttatgacatttattgcaaaaccaataaatgatataaatataattgggccaattttattaattttattaaatgtgttagctgctataataggtgctgaaataatgattaaaaaaaaggaagatataacagctcttcttgttaatatgaaaaagcctgtaattaaagagaaaaaagttaaagaggtaataaaagaatctataaaaggaattccaaaggtattagatacatcagttataattgatggaagaatatttgatatttgtgagactggatttgttgaaggaccactggttatacctaactttgtattggatgaattaaggcatatatccgattcttctgattcactaaaaagaaatagaggaagaagaggtctagatatattaaataaaatacaaaaagagctagccatagaaactcaaattgtagaagatgattttcctaaaattgcagaagttgatgcaaagttgcttaaacttgcacaaaagatggaaggaaaggttataactaatgattataatctaaataaagtggctgagtttcaaggagtaccggtattaaatataaatgaattatcgaatgcaataaaaccagtagtattacctggtgaagaaatgacaattgatatagtaaaggatggaaaagaatcaagtcaaggtgttgcatatttagaagatggaactatgattgttgttgaaggtggaagaaaatacataggacaaacaacaagtgttatagttacatcagttcttcagacagcagctggacgaatgatttttgcaaaaccaaaagataattaaaagttaaggagagttttctgtatggttagtgcgatagtattagctggaggcagaggtaagagaatgggcaatattcaaagcaagcaatatattgatttgaatggtgcgcccattctttattacacgttaaagcagtttatagaaaatgatttgatagataagatcattttagtagtgcctgaagatgaaaaagattattgtaaaagagaagtattaaataaatatggattaaaaatagatgatttagtatctggtgggaatgaaagacaagaatcagtatataatgctttggagaaattagaaaaatccgatatagtattaattcatgatggagctaggccatttgtatctcagaaaataataaattatgcggttgaatatgctaagcgttataaagctgcagcgcctggagttatgcctaaagatactataaaaattaaagatagtaataatttttcagtagatactttagttagaagtgaacttgttgcaattcaaacgccccaagcttttgattttaacctaatatatgaatgccataaagaaataaagaaaagatgtatatcagttactgatgatactagtgtagtagagcttttgggacataaagtttatatttatgagggggattataaaaatataaaaataactacaccggaagatttaatacttgcagagtattttgtgaaaaatatagtatagtaataatgtattgacaggctaaattcaggaagttataatatattaaaataaaatttaattaagattgtaaaacgttgatgaagaatagtagaagtcgattatataagagaaaaagtccgtgggctgaaagacttttaaacaggctttgaaccagcttttgagtatagggaaaaactatcggtctaaaaccgttatcattgctagagaacaaatttaggtggtaccgcgatataaagttcgccctaatatatatattaggcgggcttttttatttatccaattatatatttttaaactattaattatttgtaaaatcaaatattcagattttattacatcatatataaaatattatttgcaatctaaccaatattatttaggaggaacaccaaatgaaaatgtctaatatgttaatatcaacattaagagaagtaccagcggaagcagagattgatagccataagcttatgttaagagctggaatgataaggaaaatggctgcaggagtatataattatatgcctcttggattaaaagttttaaaaaaggttgaggatataattagggaagaaatgaatgccgcaggtgcgcaggaatttctagcatcagctattattccagcagaattatggcaagaatctggtagatgggatgcatatggagcagaaatgtttagattaaaggatagaggggatagagatttctgtttagggccaactcatgaagaagtatttacagatatagcgagaaatgaaattaagtcttacaagcaattacctcttaatttatatcagatccaaacaaagtatagagatgagcgtagacctaggtttggagtgatgagatctagggaatttgtaatgaaggatgcttatagctttgataaagatcaaggtgggctagatttagcttatgataaaatgcatgatgcatatgtaaaaatatttaatagatgtggtttagatgcaaaatgtgttgctgctgattctggtgctattggtggttcaaattcagcagagtttatggttaaatcggaagttggagaggatgatgtggtattttgcagtgaatgtaactatgcagcaaatatcgagaaagcttcatcaccagcagagaaagagttaaaacaagaattcaaggaaataaataaagttgagacacctaatacaaaaactatagatgaattggttaagtttttcggtactaatgaaaaaaaattcgcaaagactatcttgtttaatgcagatggcaaaatagtagcagttatggttaggggtgatagagaaattaatgaggttaaggttagcaatgcaattggtgaagtaattaatctagagcttgctagttcagaagatgtaaaaaaggcaacgggagcagaaataggatttgcgggaccaatagggataaaagtagatatgctattagttgatgaagaagttgctaatatgtataactttattgtgggtgctaatgaaacaggttaccatattaataatgtgaattatggaagagactttgaaggtgtaataggagattatagaaacgtaactgaaggtgaaaagtgcccagtttgcggtggtaaggttactattgcaagaggaacagaagtagggcatatatttaaacttggtactaaatattcggaagccatgaatgctaagtttatagatgaagatggaaaagaaaagccatttataatgggatgctatggaattggagttacaagaacaatggcatctataattgagcaacatcatgatgagaatggtatagtatggccattgtctgttgcaccataccatgtttctgtaattcctgttaatgtaaaagatgaggaacaagctagaattgcaaatgaaatttatgaaaaattaacaagtgctggaatagaagctcttttagatgatagaaatgaaagagcaggagtgaaattcaaagattcagaattaatgggaataccaatgagaataacagtaggtaaaaagattaatgatggagaaattgaatttaaacttagagatggagaaatggaagtaatcaaaatagaagatgtttataatataataaaaggtgaatttgagaaaaacaaaataaaactaaaataattttaggaggtaaattaatgagggtatttaatactttaacaagacaaaaagaagagtttatccctattattactggcgaagttaaaatgtacgtctgtgggccaactgtatataatttttttcacataggtaatggaagaacatttattgtatttgatactataaggagatatttggagtatagaggatataaggttagatttgtccaaaactttactgacatagacgataaaatgattaataaagctaatgatgagggaattacagtaaaagagcttggagataaatatataaaagaatactaccaagatgccgattcattaaagattgaaagagccactgtaaatcctagagcaacagaatatattcatgatataatcaaatttgttgaagagttgattgaagcaggatttgcttatgaagttgacggtgatgtttactatagcacaaaaaaatttgataattatggaagattggtaggacagaacttagatgatttgcaggttggtgcaagaatatctgttgatgaaagaaagaaagatcctatggattttgcagtatggaaagcacaaaagccaggtgaacctgcttgggaaagtccttggggacctggaaggcctgggtggcatatagagtgttcgtgcatggcgaagaaattgttgggagatacaatagatattcatgcaggtggcatggatttaagattcccgcatcatgaaaatgaaatagctcaaagtgaagctctaacaggaaaaacatttgcaaattattggctccatgcagcatttgttaatgtagataataagaaaatgtcaaaatcattaaataacttctttaccgcaagagaagttcttgaggaatatagttcggatgcaataaggttcttgatgttgtctggacactatagaatacaaataaattttactaaagaacttttagattcagcaaaatcatcaatagaaagattatataattgcataaataatcttgaaaatttgaaagatgaagtgactaaaaaattaatggatgaagcggaagaaaaatatctaaagtctttagataaatatagagaaaaatttattgagaagatggatgatgattttaatacagcagatgctatttcagtattgtttgatttgactaaagatattaacaataatgtgaatattaattcatcctctgaattatgtgagaaagcagaatcgatggttagagaactaggaaatccgctaggtatacttcaagatcgtattgagaaggatttggaaacagaaattcaggagcttattgaaaagagacagcaagccagaaaaaataaagattttgcacttgcggataaaataagagatgatttaaaaagcagaaatataattttggaagatacaccacagggtgttagatggaaaaagattgattaattaaagaaagggttgcatttttgcaacccttatttaaaggagaattataatgttagatgacttaagaattagaaaattttcaaaagatgaagcaagaatgttgaattcattacaattggcattaataggtgatggtgtatttgaagtttttattagaaattatattttgactcaaaatacagcgttatctgcaaataagatacatgtgaaggcaattggatatgtaaaagcaaaaagtcaggcgtgtataatgcatgaaattgagaatctcctaaatgaggaggaagaagcggtttataaaagaggaagaaatgcgaaatcacctactgtacctaaaaatgcagagataagggattatagaatggcgactgggtttgaagcattaattggttatctatacctagtgggggataaggaaagattagaatttatatttgatagaagtattgaaattattaattagtgtataaaattaaaaaaaggagggtttataatgaatagtaaactgaaaagaaatatttcaagtggcaagtttatggaagataaagataaatctgtaactgaatcaaaaggtaaagctaaaagctataatcaggtaaaaaataaaaataagaaagataatatggtaggaaatgataaatcaacaagcgccattgaagagagagaagatatagttattggaagaaatgctgtaattgaagctctaagaggagaaagaacgatcgaagcactatatatatctaatagtaaattagaaggttcaataaaaactattgttggtttggcaaaagaaaataaaatattaataaaagaagtggataaaagaaaacttgattcaatgtgtggtggagaagtacatcaaggggtaatagcaaaagtaactccatataaatattcagaagtatcggatatattggatttagcagagaaaagaggggaagctccgttcatagttatattggatgaggttgaagatccgcataatttaggatcaatagtaagaactgcagaattatttggagttcatggaattatactcccaaagagaagaagtgcatctgtaagtacaaccgtttataaatcttcggttggagcaatagaacatgtaaaaatagctaaagtaacaaatttaaattcgacaatagaggaactaaaagaaaaggggatctggatttatggggcagacataagggcagaagaatatagctaccaagtagattttggaggaccttgtgcagttataattggaaatgaaggaagaggtatttcaaaattaacggtggaaaagtgtgataagctaataaaaataccaatggtcggaaagattaattctttaaacgcatctgtagctggtggtataattatgtatgaagttttaaaaggacgattgaaatagagagaggtatatcgtgaaaactatttttgtagatggatataatgttataaatagttggcctaatttaaaacaaaaaaaagattctagctttgagggtgcaagacaaactcttatagatactttacataattatggagtttttaatgcttgtagaataatattagtatttgatgctcataaagttactgggagcattgaaaagaaagaagaggtaaatagaaatatatcagtagtatttacaaaggatggagaaactgcggatagttatattgagaaacaagtaaatgctctaggaaggaaacatgaaatagttgttgtaacatctgatagcctagagcagcaaacaatttttcaaagaggtgcagttagaatgtcatctttagaattttataatgaggttctaaggatagagaagtctataaaaaataaagcagataagaacagaatttcacagaaaaatataataagtgataatatagatgataggatagtcaaaatattagaagaaatcagaagaagtaagtaaattcagttgactaacataattttactggggtataattgtctaaacgagtggttagtttaatgcagaagagagttgagaataagcagttgaaaggttttttagatttcaaagataaatcagacgaagaaattgttgcgaaagctaagagtggtaatagtagggcgcaagaatatttaatttcaaaatatgagaactttgtgaagtcgaaggctaaatcatattttttaattggagccgacaaggaagacatttatcaagaagggatgataggtttatataaggctatcagagattttaatgcagaaaaatcaacatcatttaaagcctttgcagaaatatgtgtaatcagacaaataataactgcaataaaaacagctactaggcagaaacatattccgttaaatacttatgtctctttaaataagccaatatatgaagaggaatcagagagaactctccttgatgttttggcaggattgaaaatttcagatcctgaagagctaatgattagtaaggaacaaatggattatatcgagaaaaagatttcgaaagtgttatcagatttggaattagaagttcttacttcatacctagatggaaaatcttatcaggagattgcaagtgatttagaacgacattcgaagtcgatagataatgcattacaaagagtaaagagaaaattagaaaaatgcttagatttaaagtgataatttatattgacaaataaaaagaataatagtaaactttataattggtatatcaaagaagatagcaattttgaacgctcacatagctcagtcggcagagcgtcaccttggtaaggtggaggtcgtcggttcgattccgattgtgagctccaaataataaaaaataaaaaaacactaggccaagtttattagaagataataagggaggaaaattataatggcaaaagcaaagtatgaaagaagtaagccacacgttaatattggaacaataggtcacgtagaccatggtaagacaacattaacagcagcaatcacaacagtattagcaaataaaggatttgcagaagcatttaactatgcagatattgataaggctccagaagaaaaagaaagaggaatcacaatcaatacagcacacgttgagtaccaaacagaaaacagacattatgcgcacgttgactgtccagggcatgctgactatgttaagaacatgattacaggagcagcacaaatggatggagctatcttagttgtatcagcagcagatggtccaatgccacaaacaagagaacatatactactaggatcaagagttggtatccaatatatcgtagtattcttaaataaagcagatatggtagacgatccagaattattagaattagtagaaatggaagtaagagaattattaagcgaatatgacttcccaggagacgatattccagtaataacaggatcagcattaaaagcattagaaaatccaacagatgaagaagcgattaagccaatcatggatttaatggaagcagtagatagctatatcccaactccagaaagagcaacagataagccattcttaatgccaatcgaagatgtattcacaattacaggaagaggaacagttgcaacaggaagagttgaagctggagtacttcatgtaggagacgaagtagaaatcgttggattaacagaagaaaagaagaaagttgtagtaactggaatcgaaatgttcagaaagttattggatgaagcacaagctggagataacatcggagcattattaagaggagttcaaagaactgatattgaaagaggtcaagttttatcaaaaccaaattcagtacaccctcatactaaatttgtaggtcaagtatacgtacttaaaaaagaagaaggtggaagacatactccattcttcgatggatacagaccacaattctacttcagaacaacagacgttacaggatcaatcaagttaccagatggaatggaaatggtaatgcctggagatcacattgatatgaatgttgaattaatcactccaatcgcaatggatgaaggattaagattcgctatcagagaaggcggaagaactgtaggttctggagttgttactaaaatagtagaataagatacatttattactaataggactaagttatataacttagtcctatttaaaggatgattgacaagtcaaatattctatgatattgtataaaagtgacattttaagcaacgtaaattttagaagtgaataggaactcaagattcctatttaatatataagaaaactggaggtgcagtcatgagaacaaaagtaactttagcatgcacagagtgtaaacaaagaaattatgattcaatgaaaaacaaaaagaatgatccagatagattagaaatgaaaaagtattgtaaattctgtaaaaagcacactcttcatagagaaacaaagtaattagccgaagtaatgacatatagttattaaatttaaggatgtgaagatatgtcagcaaagaacagtgtaaaaactgaaaaaactattaaaagtaatggtttgtttggtttttttcgagaggttaaggtagaggttaagaaaataacttggccttcaaaagatgagacaaagaaagcatttgttgcagttattgtgttcacactaatgtatactatattagttggtggattggattctattttcaataacctctttaaaatgattttaaatttcaagtaaaagggaggtttgggtgattttatatcgcctgacgaatatgagtgatagagcacgatggtatgtagttcatacatactcaggatatgaaaataaggtaaaagcaaacttagaaaaagcaattgaaaatagaaatcttgaagcattaatccatgatatacaagtacccatggaagaagtggttgaagaaaaagatggaaagcaaaaagtctcattaaagaagaaatttcctggatatgtgcttgtgaaaatgttaatgggagatgaagcttggtacgttgttagaaatactagaggcgtaacaggatttgtaggcccaggatctaaaccagttcctctttctgatgaagaagtggaatcgatgggagtgttagaagttcctgttgagattgacttagaggtaggggaaagtataagaattatctctgggccattgagagattcagtagccacaatacaagagataattccagataaacgcaaagtgaaagctttagtggagatgtttggcagagaaacacttgccgaattagactttaatcaagttgaaaaattagtttaactataatgaactaattttaattaagtgggagaactaaaaagagttcgttataccacagtaataggaggaataacaaaaatggctaagaaagtaactggaatgattaaacttcaacttcaagcaggtaaggcaacaccagctccacctgtaggtccagctttaggtcaacacggtgtaaatataatgggattctgtaaggagtttaatgcaaaaactgcaaatcaagctgggtatataataccagtagttattacagtttaccaagacagatcttttagttttatattaaagactcctccagctgcagttctaattaagaaggaaataggattagaaagtggttctggagtacctaataaaacaaaggttggtaaattaactcaagatcaacttaaaaagattgctgaaactaagatgccagacttaaatgctgcaagtcttgaatcagctatgagaatgatagcagggacagctagaagtatgggcgtaactattgaagagtaattcgtaaaaataagtgggaggtcaaaaccgttaataccacagaggaggcaaattatgggaaaaaaatacattgaaagtgcaaagcttatagacaagagtgcattatataatccagtagaagcattagatcttacattaaagactgcaaaggcaaacttcgatgaaactattgaattacatgtaagacttggagtagatccaagacatgcagatcaacaagttagaggtgcagttgtattaccaaacggaacaggtaaaacagttagagtgcttgtttttgctaaaggagataaggctgcagaagcacaacaagcaggagcagatttcgttggagcagatgaactagttcaaaaaatccaaagcgaaaactggtttgattatgatgtagttgttgcaacaccagatatgatgggaattgtaggtagaattggtagagtgttaggacctaaaggactaatgccaaatccaaagtcaggaacagtaacatttgatgttgctaaggcaattgaagaaattaaagctggtaaagttgaatatagagtagataaaacagcaatagttcactgtccaattgggaaaaaatcatttggaactgaaaaattaaaagaaaactttactgcattaatggaagctttagttaaggctaaaccagcagcagcaaaagggcaatacttaaaatcagtatctgtttcaagcacaatgggaccaagtgcaaaagttaatcctacaagagctttagattagtattgacttaattgaaattatgtagtataatttcaaatgttgtaaaaagaaaatattttttccgtagacagtgggtgcgaaagcgtaaagtataactgcccgcctaggtatataatagattgtattataggccttccatgtctgcggaaggtcttttttaataaaagaagcagtttgaactgtgaggaggtggactacagtaatgaataaaaacagagaacttaaagaagcaaaagttgctgaaattaaggaaaaattagaaaaatcaaaagctgttgttcttagtaagtatcaaggtctaaatgttgaagaagatacagctcttagaaaaagtttaagagaagctggagttgaatacaaagtatataaaaatactttagtaactttagcagctaaagaattaggcttagatggtatagcagaatatttagaaggtgcagtatctattgcatttagttatgaagatgtaacattagctgcaagacttttaaatgattttgctaaagatcacaagaagttagaattaaaggctggtatcatagaaggagaaatctatgatgaagctaagattaaacaacttgcaacaataccatcaaaagaagttcttattgcaaaacttcttggaagtatcaagtctccaatatcaagctttgcacgtgtattaagtgctattgctgatagcaagggaactgagtctgcagaataatttaaagattaactaaaattttaaaaaaaaaattcggaggtgctattaaaaatgacaagagaagaaataattcaagcaataaaagaaatgagcgttttagatttaaatgaattagtaaaggcttgtgaagaagaatttggagtaagtgctgctgctgctgttgtagctggtggagctgtagctggtggagctgctgctgaagaaaaaactgaattcgacgtagtattagcaagcgcaggagataacaagattaaagttatcaaagtagttagagaaataacaggattaggattaaaagaagctaaggaaatagttgatggagctcctaagacattaaaagaaggcgtttctaaagacgaagctgaagatatgaaagctaaattagctgaagtaggagctactgcagaagttaagtagtttgttttaaagaaaaaggtgctttatagcaccttttttaaactgaatttataaagctatataaaatgcttgttaggtaaataggtattttatatagctttataactgaaaagaattattcaataatatttattgacaagaaaaatatcctatgatattataatataatgtattattctctatggaatactatatatttatagtggaaataaggagtataatctggtgaataatggttatactatagaaagacgctgtccgaaagcaaagtccttagggaaagtatgcttttggctattttagtttattttatacaaggggtgaaaattcatggtacatcctgtccaagttggaaaaagaacaagaatgagttttggtaaggttaatgatgttactgaaatgccgaatttaattgaagtacaattagattcgtatgaatggtttttaagagaagggttgcatgaagtttttgatgatattaatcctatcacaaacttcacgggaaatttagtacttgagttcgtagactataaacttgatatggaaaacatcaagtattctgtcgaagaatgtaaggaaagagacgcgacttatgctgcgccattaaaagtttcaatcagattgcagaataatgaaactggtgaaattaaagaacaagaagtatttatgggtgacttcccattaatgacagagcaaggtacctttgtaattaatggtgctgaaagagttatagttagtcaattagtaagatcaccgggtgtatattataactactctatagataagagtggtaaaaagttatattcatcaactgttattcctaatagaggagcatggttggaatacgaaacagattctaatgatgtaatttatgtaagaattgataaaactagaaaattatcaattagcatattggcaagagctatgggattaggcagtgatcaggagttgttagatttcttcggtgaagaagaaagatttagagcttcaatagaaaaagacaacactaaaactaaagaggaagcactacttgaaatatataaaagattgagacctggtgaaccaccaacagtagatagtgctatatctttaattgatacattatttttcgatgcaaaaagatatgatttatctagagtaggaagatacaaatttaataaaaaacttgcattaaacctaagaatagctaaccaagtagcggccactgatattgttaatccacaaaccggagaaataatggtggagaagggtcagaaaataagtagattagtagctgaagaaattcagaatgcaggtgttaaatctgttgatgtattaatagaagataaagttattagagtaattagtaataactttgtagacttaaagaaacaagtttcctttgatatttcagacctaggaataaaagaattggttcattatccaactttgaaagaaatattggataatttttctgatgaagcaagtattaaagaggaaattaagaagaatattagtaaacttattcctaaacacatcataagggatgatatatttgcaactataagctatgaattaggattaacttatggaataggttatgttgatgatatagatcatttaggcaatagaagattaagatctgtaggagaattattgcagaaccaatttagaattggtctatctagaatggaaagagtagtaaaggaaagaatgactattcaagatcaagaagctataactcctcaaatgttaattaatataagaccagtagcagcagctattaaagaattttttggtagctcgcagttatcacaattcatggatcaaacaaatccattatcagaacttactcataaaagaaggttgtcagcattgggaccaggaggtctttcaagggaaagagctggtttcgaagtaagagacgttcaccattcgcattatggtagaatgtgtcctattgaaacaccagaaggtccaaatatagggcttataaattctttggcgacttttgcaaaagttaatgagtatggatttatagaaacaccatatagaattgttgataaagaaaatggaagagctacagatgaaataaggtatttcactgcagatgaagaagatcaatgtttaatagctgaagcaaaagagccaatggatgaaaatgggcactttataaataaaaaggtcagagtaagacatttagaggatatattagttgttccaacaactgatgttgatttaatagatgtatctgcaagacaaattgtatctgttgcaactgcgatgataccattccttgagaatgatgatgcatcaagagctcttatgggttcaaacatgcaacgtcaagcagttccattactaagtcctcaagcaccaatagttggaacagggatcgaatttaaagctgctgttgactcaggggtattaccaaaggcaaagaatgctggagtagttacttatgtttcgggtagtgagattcgtgttaagagagactcagatggtggcacagatgtatataaattattaaagtttaagagaagtaactcaggaacttgtattaatcaaagaccgatagttgatacgggagaaatagtatacaagaatcaagttattgcagatggtccatctacagatttaggtgaaattgcattaggtaagaacatcagaatgggattcataacttgggaaggttataattacgaagatgctatgctaatttcagaagaattggtcagagaagatgtctttacatctatgcatatagaagaatatgaatgtgaagctagagatacgaagctaggaccagaggaaattacaagagacataccaaatgtaagcgatgatgcacttaaggatgtagatgacagaggaatcatacgaatcggtgcagaagtgagatcgggagacatattggttggaaaagtaactccaaaaggtgaaactgagcttacagcagaagaaagattgctaagagcaatatttggtgaaaaggcaagagaagtaagagatacttcattaagagttcctcacggagaagctggaataattgttgatataaaagtatttacaagagaaaatggagacgaattgaatcctggagtaaatgaacttgtaagatgctatatagcacaaaaaagaaaaatttcagttggggataaaatggcaggacgtcatggtaataagggggttatctctagaatattaccagaagaagatatgccattcttaccggacggtagacctcttcaaatatgcttaaatccattaggagtaccttctcgtatgaatataggtcaggtacttgaagttcacttaggttgggcagctagtcatttaggatggcatatagctacacctgtatttgatggtgcaacacaacctgaaatcacagaatgcatgataaaagcaggatttagagaagatgctaaaactatattatatgatggtagaactggagaaccgtttgataatccagtaactgttggtataatgtatattttaaaacttcaccatttagtagatgataagattcatgctagatctacaggaccatattcattggttactcaacaaccattaggaggtaaagctcaatttggtggtcaaagatttggtgaaatggaagtttgggcattagaagcatatggagcagcacatacacttcaggaaatattaactgttaaatcagatgatgttgtaggtagagttaaaacatatgaagctatagtaaaaggtgaaaatatacctgaaccaggggttccagaatcattcaaggttcttattaaggaactacaagcattatgcttagatattaaggtattaaatgatgagcatgaagaagtaactttaaaggaatttgttgatgaagatatggcaaatctagaagttaatatagaaggcactgaagagattatggtgccagaaccagatgtattagatgatgatagttatgatcaaaataatgatgaagacatagatgaaattgattatgatgaaagtgtcgatatagctgatcttgaaactgaattagaactagatgattttaatgatgaacactaattttgaagggaggatttacccttgtttgaattaaataatttcgatgcaatacaaattggtttagcatctccagaacaaataagacagtggtcaagaggagaagttaaaaaaccagaaactattaactataggactttaaaaccagagagagatggtttattctgtgaaagaatttttggaccaatgaaagattgggaatgtcactgtggaaagtataagagagtaagatataaagggatagtttgtgatagatgtggagttgaagtcacaaaagctaaagtaagaagagaaagaatggggcatatagaattagctgccccagtatctcatatttggtattttaagggaattccatcaagaatgggattaattttagatatgtcgccaagagctttggaaaaagttctgtattttgcatcttatatagtgatagatcctaaggaaacaccattattaaagaaacaacttctcaatgaaaaggaatatagagaagctgtagataaatatggcgatgaaagctttgtagcaggcatgggagcagaggcaattcaagatttactaaatgaaattgatttagtaacttcttcaaaagaacttaaagaagaattaaagcaaagttcgggacaaaagaaagttagaataattagaagactagaagttgtagagtcatttagaaaatcaggtaatgatccacagtggatggttataaatgtaataccagtaattccaccggatttaagacctatggttcaattagatggaggaagatttgcgacatctgatttaaatgatttatatagaagagtaataaacagaaataacagattaaagaagttattagatttaggcgctccagatataattgtaagaaatgaaaaaagaatgcttcaagaagcagtagatgctcttattgacaatggtagaagaggcagaccggtaactggaccaggaaatagacctttgaaatctctttcagatatgttaaaaggtaaacagggtagatttagacagaacttacttggtaagagagttgactactcaggtagatcggttattgttgttggcccagaacttaaaatgtatcaatgcggacttcctaaggaaatggcaatagaattatttaaaccatttgttatgaaaaagcttgtacaagatggcatagctcataatataaagagtgccaagagaatggttgagagagtattaccacaagtatgggatgtattagaagaagtaattgcagatcatccagtattacttaaccgtgcacctactctacacagacttggtattcaagcgttccaacctgtattagtagaaggtagagcaataaaacttcatccgttagcatgtacagcttataatgctgacttcgatggagaccaaatggctgtccatcttccattatcagtagaggctcaagctgaagctagatttttaatgttagctgcaacaaatattctaaaaccatcagatggtaaaccggtttgtgtacctacacaagatatgattctaggatcatattatttaacaatggataaaaatggagctaaaggcgatggtatgacattctcaagcaaagatgaagctataatggcgtatgaagttaaagaaattgacatacatgctcaaataaatgttagaatgtttagagaagtcgatggagaattgaaatctaagattattaaaactactgttggaaagattatatttaatgaatcaattccacaaaatcttggattagtaaatagagaaaatgaagaagaatcatttaatctagaagttgatttcttagctacgaaaaagtcgttaggaaagataatcgatcaatgttatatgaagcatggtccggttaaaacatctataatgcttgataatattaaagcattggggtatcattattcatcaatcggggctgtaacagttgcttcatcagatataatagttccaaaagtgaaatatgatttacttaaggaagcagatgaaacgatcgaaaagattgaaaagatgtataagagaggtttcatatctgatgaagaaagatatgaaagagttatagaaaaatggactcagacaactgaagatgtagccaatgcattaatggatagtcttgataaatttaatccgatatatatgatggctgattctggagccagaggatcaaaatctcagatcaagcagttagctggtatgagaggtcttatggccagtccatcaggtaagattatagagttacctataagggcatcatttaaagaaggattagatgtaatagaatatttcttatcaacacatggagctagaaagggtaatgcagatacagccttaaagactgcggattctggatatctaactagaagacttgttgatgtttcacaagatgttattgtaagagaagaagattgtggcacagatgaaggaatatttgtaagtgaaattaaagaaggtaacgaagttatcgaggaattaagagaaagattaattggtagatatacagcagaagatattgttgatccggaaactggggatgtattacatccgaagaatgaatatatggatccatatgccgctgataagatagtttctgcaggaattaagaaagtgaagattagatccgtattcacttgtaagtgtaaagttggtgtatgtgctagatgctatggtatgaatatggcgacagctaaaaagattgatattggagaagctgttggaataatagcggctcaatcaattggagaaccaggaacacagcttacaatgagaacattccatactggtggagttgcaggagcagatattactcaaggtttacctagagttgaggagctatttgaggctagaaaaccgaaggggcttgcaatagtaagtgaaattgctggtactgcgagaatagaagaaactaaaaagaaaagaacagtaatagttatgggtgccgatggagaagaacgtagctacgatataccttttggatcaagattgagagttaatgaaagtgattatgttgaagctggagatgaaatcacagaaggttcggtaaatcctcatgatataatgagcataaaaggaatagatggagcgagaagatacttactttcagaggttcaaaaagtttatagactacaaggtgttgatattaatgataaacacttagaagttgttgttagacaaatgactagaaagataaaaatcgttgattcaggtgacacggatttattaccaggaactatgattgatatgtttgatttctatgaagaaaatgctagagtaagagaatttggtggagaagaagcaaaaggagaacaaactctactaggtataactaaggcagcattagcaactgatagtttcctatcagcagcttcgttccaagaaacgacaagagttctaacagaagcagcaattaaaggaaaagttgatcctttagttggattaaaagaaaatgtaataattggtaagcttattccagctggtactggaatgatgagatatagatctttaaaggtggaaacagatagtgaattagttgaagaaactattggagaaactgttgaagaataagcatgtattatattgacatgtgtaaaattaaatgataaaatacaatttgtgtgattttaaatgtgaaatcacacaaattaatgtgaatatatcattttataaaagtaaatttatagcttaatacataggatattgatttattgtgtaaaatttaggtatatttgataagttgtatgatatactaattcatataacttgataaattagtgtttatcttaattttaaaatagataaataaatttcaggaggtgaaaaaatgccaactattagccaattagtaagaaaaggcagaaaaacagcagtagttaaatcaactgcaccagcacttaaagagtgtcctcaaaaaagaggtgtatgtacagtagttaaaacaacaactcctaaaaaacctaactcagcgttaagaaaaattgccagagttagattaacaaatggatttgaagtaactgcatatattggtggagtaggtcacaacttacaagaacatagtgttgttcttataagaggtggaagagttaaagaccttcctggtgttagataccatatcgtaagaggtgcgctagactgcgctggagtagctaacagattacaaggaagatcaaagtacggtgctaagagacctaagaagaaataggaattttaacaaagaatagtgcttatcttcaacagaaattatagattttattttgagtttatatagatgtaaaagatgtagcactttacggtatgaaaaataccgagtaccgatgaacttaaatttaaaatgttaaggagggaagaaaagtgccaagaaaaggacatatcgcaaaaagagacgtattaccagatccagtatacaattcaaaggttgttactaaatttataaatagtataatggaagatggtaagaagggtgtagcccaaaagatatgctatgaagcatttggattaatagcaaaaagaagtggaaaagaagctttagaagtatttgaagaagctatgaacaatgtaatgccattactagaagttaaagctagaagaataggtggtgctacttatcaagttccaatcgaagttagaccagaaagaagacagacattaggaataagatggatgttaatagcagctagaaaaagaggcgaaaagctaatgagtgaaagagttgctggtgaattattagatgcatctaataatacaggagcagctgttaagaagagagaagatactcataaaatggcagaagctaataaggcatttgctcattacagatactaatatctataaaactgttttggcttatgctaaggcagttttgtcaaattaaattatattttactcattgagaggaggacaaataaatggctagaaaatatcctttagataaatttcgtaacttcggtataatggctcatatagatgctggtaagacaacaactactgaacgtatattgttctatacaggagtgagtcacaaaataggggaagttcatgatggtgaagctacaatggactggatggttcaagaacaagaaagaggtataacaattacttcagcagcaacttcatgtttctggaaagaacatgaacttaatattatagatactcctggtcacgtagacttcacagttgaagttgaaagatcattaagagtacttgatggagctgttacagttcttgatgcaaagagcggtgttgaaccacaaactgaaactgtttggagacaggcagataagtatggtgtgccaagaatgatttatgtaaataaaatggatgcaacaggtgctgatttctttagatgtattcaaacagttaaagatagattaaaagcaaacgcagttccgattcagattccagtaggtagcgaacaaggcttcaaaggaatggttgaccttataaagaatgttgcttttatattctatgatgatcttggaaaagatatgagagaagaagctataccagctgaatatgctgatcaagctgaagaatacagagcagcaatgatagaagctattgctgaaacagatgaagaattaatggaaaagtatttagaaggtgaagaacttacaattgaagaattaaaagctgctttaagaaaagctacaattgctaacgaaatatacccttgtatttgtggttcttcatacaaaaacaaaggtgttcaagaaatgattgatggagttgtagattacttaccatcaccattagatgttccagcaataaaaggaacaacattagatggagaagaagatcatagaaattcttcagactctgaaccattatcagctttagcatttaaaatagctactgatccatttgttggtaaattagcatttacaagaatatattctggagtaatgcaaagtggttcatatgttcttaactcaacaaaaggtaagaaagaaagaatcggtagacttgttaagatgcattcaaattcaagatcagaagttgaatcattagaagcaggggaaattggtgcagtaattggattaaaaaacactacaacaggtgatactttatgtgcagaaaatagtccaataattcttgaagctatggagttcccagaaccagttataagagtagctattgaaccaaagacaaaagatgctcaagaaaagatggggatggcattagctaaattagcagaagaagatcctacatttaagacttggactgatacagaaacaggtcaaacaattattgcgggtatgggagagcttcacttagaaataattgttgatagacttcaaagggaatttaaagttgaatgtaatgttggagcacctcaggttgcttataaggaaacaattagatcagctgttaaagcagaagctaaatatgctaaacaatcaggtggtaaaggacaatacggtcatgctgtaattgaaatggaaccaactgaaggtgaatatgtatttgaaaatgctgttgttggaggagctattcctaaggaatacataccagctattgatgcaggtattcaagaagcatctaaaaatggtataattgcaggttataatgttattaactttaaagttaagttagtacacggttcataccatgaagttgactcatctgaaatggcatttaaaatagcaggttctatggcattcaagaatgcaatgtctaaagcaagccctgtacttcttgaaccaatgatgaaagttgaagtaacagttccagaagaatacatgggagatgttatcggagatatcaattcaagaagaggtataatggaaggtatggaagctcttaatggagctcaagttatcagagcgtttgttccattatctgaaatgtttggatatgctactactttaagatctagaactcaaggtagaggagtttactcaatggtatttgatcactatgatgaagttccaaagaatattcaagagcaaattgcaggtagcagagctaaataaagagtaatataaagtttttatcatattgtatattaaagtattttatgtaacatataatgtgttttaataatttttatataatatggtaaaaaacttgaataataaatatagatattaaaatatctataagttataatatttacgaaaagattctttaaattatgtctatcaagggaggaaaattataatggcaaaagcaaagtatgaaagaagtaagccacacgttaatattggaacaataggtcacgtagaccacggtaagacaacattaacagcagcaatcacaacagtattagcaaataaaggatttgcagaagcatttaactatgcggatattgataaggctccagaagaaaaagaaagaggaatcacaatcaatacagcacacgttgagtatcaaacagaaaacagacactatgctcacgttgactgtccagggcatgctgactatgttaagaacatgattacaggagcagcacaaatggatggagctatcttagttgtatcagcagcagatggtccaatgccacaaacaagagaacatatactactaggatcaagagttggtatccaatatatcgtagtattcttaaataaagcagacatggtagacgatccagaattattagaattagtagaaatggaagtaagagaattattaagcgaatatgacttcccaggagacgatattccagtaataacaggatcagcattaaaagcattagaaaatccaacagatgaagaagcaattaagccaatcatggatttaatggaagcagtagacagctatatcccaactccagaaagagcaacagataagccattcttaatgccaatcgaagatgtattcacaattacaggaagaggaacagttgcaacaggaagagttgaagctggagtacttcatgtaggagacgaagtagaaatcgttggattaacagaagaaaagaagaaagttgtagtaactggaatcgaaatgttcagaaagttattggatgaagcacaagctggagataacatcggagcattattaagaggagttcaaagaactgatattgaaagaggtcaagttttatcaaaaccaaattcagtacaccctcacactaaatttgtaggtcaagtatacgtacttaaaaaagaagaaggtggaagacatactccattctttgatggatacagaccacaattctatttcagaacaacagacgttacaggatcaatcaagttaccagatggaatggaaatggtaatgcctggagatcacattgatatgaatgttgaattaatcactccaatcgcaatggatgaaggattaagattcgctatcagagaaggcggaagaactgtaggttctggagttgttactaaaatagtagaataagatacatttatgttcgacagtaaaagcaaggaaattacaccttgcttttattttataaattatataatttgattagtatttcataataaaattagattgtcatcacaaatatttatttattatcgaaaataaattatgacaaactgatataaaattttagtaaagatatctaaaaaatcatccaatataaggaattaaaaaaaattaggaaaatataaaaaaaagcttgaaaagacaatataacaatagtataattaagaagttgcatagcatacagcgaggattcaagaggttgccggacttccgggtaattcttgatgagtaagtttggatctagaatccgacgacagggattctgtattaagtttggatatcacgaaacacctggaacagtttacagaatagccgctgttgtgcgttagaagtaaaacgtacataaaaggagggaaatgaaatgtcaaagcaaaaaataagaattagattaaaggcttttgatcatacaattttagatcaatcagctgaaaaaattgttgaaactgcaaaaacatcaggagctaaggttgtaggaccagtgccactaccaactgaaaaagatgttgttacaatattaagagcggttcacaagtacaaagattcaagagaacaatttgagataagaactcataagagattaatcgatattgttaatccatcacctaaaactgttgatgcattaatgagattaaatcttccagcgggtgttgatatagaaatcaagctttagtactgggaataatataaaacggctagttatgattgttaacagtccgctaattagtttgggaggtgtaaatacatgaaaaaagctataattggaagaaaagttggaatgacacaaatttttgatgaaaaaggaaaagtgattcctgtaactgtagtagaagctggcccatgtgttgttgttcaaaagaaaacattagaaaatgatggttatgaagcaatacaagttggtttcgatgaaattagagaaaagttagctaataagccaagaaaaggtcactttgctaaggctggagctactttaagaagaactcttaaagaatttagacttgacgatataagtcaatacgaagttggaaatgaaataaaagctgatgtatttggagcaggagataaagttgatgtatctgcagtatctaagggaaagggtttccaaggatcaattaaaagatggaatcaacaaagaggacctatgactcatggttctaagttccatagagcaccaggttcaatgggagcttcatcagatccatctagaacattcaaaaacaagagaatgccaggacatatgggatctgtaaatacaacagtacttaatttagaagttgttaaagtaatagctgaaaagaatttaatactaattaagggtggaatcccaggacctaataaaggtacagtagtaattaaagatacagttagagcttaatttctttgaagaaaggaggaaataaaatgcctacagtaggagtatttaataaagaaggaaataaagttgcagatatggagttaaatgaaaatgtatttgcagcagaaattaatgaatatgcattgcaccaagtagtagttgcattattagctaacaaaagacaaggaactcaatcaactaaaactagatctgaagttagaggaggcggaatcaagccttggagacaaaagggtactggaagagcaagacaaggttctatcagatcaccacaatggatcaaaggtggaattgtattcgcaccaaagccaagagactacagagtttcagttccaaagagtatgagaaaggttgctatgaaatctgctttaactagcaaggttcaagataatcaaatgatagttcttgattcattaaattttgaagcaccaaaaactaagagcatgatagaaatgctaaaggctttagaagctaataaagcattaattataacagctgaatcaaatgaagttgtttataagtcagcaagaaacattcaaggaataagtgttattcctgcaaacaacatcaatgtatatgatttattgaaatatgaaaaattaatcataactaaagatgctgtatcaaaaattgaggaggtgtacgcataatgaaattaacaagccatgatataataagaaagccaatcataactgaaaaaagtatggcgtctatggccgaaaaaaggtacactttcatagttcatgttgatgctaataaatctcaaataaagagagctgtggaagaagttttcaatgttaaagttgaatctgttaacactataaacggcttaggtaaaactaagagaatgggcgtacatgtaggtaagagatcagattacaagaaagctatagttacattaactgaagaaagtaatggaattgaattcttcgagggaatgcaataatagtagaataaagccattattggtgatcaacaccagagaagcttgaagaaggagggaattttaaatggcagttaaaaagtttaaccctattacaccagcaagaagacaaatgactatgccaacttttgaagaaataacttcacaagaaccagaaaagtcacttcttgttgcattaaagagtaaagcgggtagaaatgctcaaggtaaaattactgttagacatcgtggcggcggtgttaagagaaaatatagaataatagactttaaaagaaataaagatgaaatcccagcaaaggttgcaactatagaatatgatccaaacagatcagcatatattgctcttgctatatatagcgatggagaaaagagatatattcttgcaccagcaggattaaaagttggagatgtaatagagtctggagttaatgctgatatcaaacctggtaatgcacttccattaaagaacataccagtaggtacagttattcacaacatagaattacaaagaggtaaaggtggtcaattagttagagcagcaggtggatcagctcaattaatggctaaagaaggagattatgcaactcttagattaccatcaggtgaaatgagatatgtaagaatcgaatgtagagctacaataggaacactttctaatgcaacaaacgatattgttaatatcggtaaagctggtagaaagagacatatgggatggagaccaacagttagaggatctgtaatgaaccctaatgatcaccctcatggtggtggtgaaggtaaatctccagttggtagaccaagtccagttactccatggggtaaaccagcacttggatacaaaactagaaagactaagaaatattcagataaatttattatcaaagatagaagagctaagtagtttgaggagaatagtaagttctcttcacagcttagaccttagtgtttatgaagggaggcatattagtgagtagatcaacaaagaaagcaccttttgttcatgaaggactttttaagaaaatagaagaaatgaatggtaatggagaaaaaaaggttgttaagacttggtcaagaagttcaacaatttttccacaattcataggtcatacaattgctgttcatgatggaagaaagcatgtaccagtgtatgtatcagaagatatggttggccataagttaggtgagtttgtattaactagaacttataaaggtcatgacgataaaacatcaaaaagatagcctggaaaggaggatcataaatggaagctagagctatagcaaaatatattagaatgtctccaacaaaggtaggagtaattcttgatttaataagaggaaaacaagttaacgaagcttttgctattttacaatatactccaagagaagcagctgtagttataaataaagttttaaaatcagctgttgctaatgcagaaaacaatttggaattgaatgctgataacttatatgtttcggaatgtttcgttggtcaaggatcaacattaaagagattccaacctcatgctcaaggtagagcatttaaaatattaaagaaaacaagcaatataacagtagttgttaaagaaagagcttaataagataaaaggagggaaaagcaagtgggtcaaaaagtaaatcctcatggccttagagtaggtgttatcaagggatgggacgcaaaatggtatgctaacaagaagaattttgctgataatcttatagaagataacaagattagaaaatttgtgaaaaaggaacttttttctgcaggtatttctaaaattgaaattgaaagagctgctaaaagagtaaaattaaacatatatacagcaaagcctggtgttataataggtaaaggtggatctggaattgaggctttaaaaaataaattaactcaattcgttgaaaataagaatgttttaataaacatagttgaagttaaaagtgcagaagctgatgcacaattaatggctgaaaatattgctgcacaattagaaaagagaatttcattcagaagagctatgaagcaaacaatgcaaagagctatgaaacacggaataaagggtgtaaaaactgcttgttctggtagattaggtggagcagaaatagcaagaactgaacattatcatgaaggaacaattccactacaaacattaagagctgatattgattatggatttgctgaagcagatacaacatatggaaaaatcggagttaaggtttgggtttataatggagaagttcttccaactaagaaagtagaaaaggaagaggctaacgcataggaaaggaggaatagatcatgttaatgcctaaaagggtaaaacatcgtaaggtgcaacgtggtagaatgaaaggtaaagctacaagaggtaatttcttagcttatggtgattacggaatccaagcgctaacttgtggatggataacaagtaaccaaattgaatctgccagaattgctatcaatagatacattaaaagaggtggaaagctttggataaagattttcccagataaaccagttacagaaaagccagctgaaacaagaatgggttcaggtaaaggatcaccagaatactgggttgcagtagttaaaccaggtagagtactatttgaattatcaggagtaccagaagaaactgcaagagaagcaatgagacttgcttcacataaacttcctgtaaaaacaaaatttgtttcaaaaagagattttgaggaaatgggtggtgaagaataatgaaggctagagaattaaaagaattgaaatcaagcaatcctcaagatttaacagttaaattgggcgatcttaaagcggagctatttaatttaagatttcaattagctacaggacaattagaaaatccaatgagaataagagaagttaagaaatctatagcccaaataaaaaccatcttaagagaagaagaattaaaagcattggaacaataaaagttggaaggaggtaagccctaatggaaagatcattaagaaagaaaagaattggtagggttgtttctgataaaatggaaaaaactattgtagttgctgttgaaactaaggttagacacccattatacggtaagacagttaatagaactacaaagtttaaagtacatgatgagaataatgaagctaaaattaatgatagagtatcaataatggaaactagacctttatctaaagataagagatggagacttgttgaaatagttgaaaaggctaaataagctttaaaactgaaaggagggtaatttaatgatacaacaacaaaccttattaaaggttgcagataattcaggtgcaaaagaaattatgtgtatcagagtattaggtggatctaaaagaaagtttggtaatatcggcgatgttatagttgctagcgttaaaagtgcaacaccaggtggagttgttaaaaaaggtgatgttgtaaaggcagttgtagttagatcagtaaaaggtgtaagaagagctgatggttcatatattaaatttgacgaaaacgcagcagttataatcaaagatgataaacaaccaagaggaactcgtatctttggacctgttgctagggagctaagagataaagaattcactaaaattttatcattagcaccagaagttctataagaggaggtggccaacttgaagatacatgtaagaaagaatgatacagttattgttatatctggaaaagataaaggcaaaactggtgaagtgttaaaagcgtatccaaagacaggaaaagttcttgttcaaggagttaatatagttaaaaaacatcaaaaagctaataagggtcaagttgaaagcgctataattgaaaaagaagcagcaatcaacagctcaaaagttatgttatattgtaacaaatgtaagaatgcgactagaattagtaacaaagttttagatgatggtactaaggttagagtatgtaaaaaatgcggagaaacattctagattttgaaaggaggtaactaatatgacaagacttcaagaaaaatatcaaaaagaagtagttccagctatgattgaaaagttcggatataaaaacataatggaagtaccaaagctagagaagatagtaatcaacatgggagttggagaagctaaggaaaatcaaaaagtgctagaatcagcagttaatgatttgactttaatagcaggtcaaaagcctgtattaacaagagctaaaaagtctgtagctaactttaaaattagagaaaatatgccattaggatgcaaagttactctaagaaaagctaacatgtttgaatttgctgataaactaatgagcatcgcactaccaagagttagagatttcagaggggtttctagcaaagcttttgatggtagaggaaattattcattaggaattaaagaacaattaatattcccagaaatagaatatgataagatagataaagttagaggaatggatataatcttcgttactacagctaacactgacgaagaagctagggaattattaagattccttggaatgccattcgctcaataataaggagggaaacacattggcacgtaaggctattattgaaaagtggagcaaaactcctaaatacaagacaagagcttatacaagatgtagaatatgtggaagaccacatgctgtattaaaaaaatatggagtatgccgtatttgttttagagaacttgcttataagggcgaaattccaggttgtagaaaagcaagttggtaagatatacgatgtaacgaaaggaggcacattaaatggttatgacagatcctatagcagatttattaactcgtgtaagaaatgctaatgctgtaagacatgaagtggtagaagtaccttcttcaaacgtaaagaaggaaattgcaaatatattattacaagagggttatataaaagaaataaatgaatataacgatggagttgttccaatgttaagattatctcttaagtatggagctaataaagaaagagttataactggtattaagagaatttctaaaccaggattaagagtttattgcaagaaagacgaggtaccaaaagttcttaatggattaggtatcgctgttgtttcaacttcaaatggaataatggtagatagagaagctagaaagaacggattaggtggagaagtaatctgctacgtttggtaatatctcagataaattaaactagataaaattgtaaaatgcaattttaaaataatacaggaggtgcaattatgtcaagagtaggtagattaccaatagctattcctgctgatgtaactgttactgtaacaccagacaatttagttacagttaagggaccaaaaggtgaattagttaaaactatgcataaagatattagcatagctgttgaaaacaatgaagtaattgttactagacatagtgaacaaaaagatcacagagctcttcacggtttaacaagagcattaattaataatatggtaattggagtaaaacaagggtaccaaaaaactttagatttagttggtgttggttatagagctcaattacaaggtaaaaagcttgtaatgaaccttggatattcacatccagttgaaattgaacctattgacgggatcacatttgaaactccagctgcaactagagtaatagttagtggaatcgacaaggaaaaagttggatttgctgcagcggatataagaaaatggagagtaccagaaccatataagggtaaaggtattaagtatgaaaatgaagtgatcagacgtaaagaaggtaagactggtaagaaataatagaaaggagtgagttttatgttcaaaaaggtagacaaaaaggcgagcagagaaaaacgtcaccttagagttcgtaaaaaagtttttggaactgcggaaagaccaagactttcagtatttaagagtgaaaagaatatatatgcacaagttattgatgatataaatggtgttacattagtagctgcttcaagtttagaaaaagattttgctgcaaaaggcggaaacaaagaaggtgctaaacttgtaggtgaattagtagctaaaaaagctatagaaaaaggaattgacgtagtggtatttgatagaggcggatacatatatcacggaagaattcaagaattagcacaagcagctagagaagctggcttgaaattctaattaaacaaggagggaaataaatgagaatcgatcctagtacactagaccttaaagaaaaggttgttttcataaacagagttactaaggttgttaagggtggtagaaacttcagattcagcgctctagttgttgtcggagacgagaacggacacgttggcgttggaatgggtaagtcaatcgaaatcccagaagcaataaaaaaaggaatagaagatgctaagaagaacttagtaagcgttgcaatggtaggaacaacaattcctcaccaagttaatggtaagttcggaactgcaaatgttctaattatgccagctaaagaaggtacaggagttattgctggaggtccagcaagagcagtacttgaattagcaggattaaaggatgttagagctaaatcattaggttcaaataatcctaataacatggtaaatgctacaataaacggattagctagcttaagaacagtagaagatatagctaaattaagaggcaaatctgttgaagaaatattaggttaaggagatattgcaatggctaaattaagaattacattagttaagagcttaataggtagaaaaaaagaccatatcgctactgcaaatgctcttggactaacaaagataagaaaaacagtagaacctgaggcaacacctcaagttcaaggtatgataaaaaagattgaatatctattaaaagtagaagaagtataaaaacaaggaggtgcactgaatatgaaacttcacgaattaaaaccagcagcaggtagcaagaaagcacctaaaagaattggtagaggtactggttctggattaggaagaaatgctggtaaaggtgaaaagggtcaaaatgcaagatcaggtggtggcgtaagacctggttttgaaggcggtcaaatgcctttatatagaagacttcctaagagaggttttacaaacatttttgcaaagaagattgttagcataaatcttgacagattaaatatctttgaaaatggtactgaagttactccagaattattacttgaaagaagagttgtaagtaaggttttggatggagtaaagattcttggaaacggaacattagaaaaaagcttaacggttaaaggatgtaagttctctaagtctgctatagaaaagattgaagcagctgggggaaaagttgaggtgatgtaaagtgcttcaaactttaagcaatgcattcaaagttcctgaacttagaaaaaagattttatggacagtattattagttgcagttttcaggatgggaagtcatattcctcttcctggaattaactctgattttttaaaaaatctatctcagtctggtggactattaggattttatgatatgctttctggaggagcttttagcagatctagtatattagcattaggagttatgccatacattaatgcatcaataataattcaattattaactgttgctatcccacaattggagcaactatcaaaagaaggagatactggcagaaaaaagatacaaaatgcaacacgttatgtatctcttggaatagcttttatcttagcttatggaatttttgcaacaatttcaagtagtggagctacagttggattaactgcaatccaaaagactattgttgtttttgcactagtggttggaacaacattttgtatgtggttaggtgatcaacttacagttaaaggcattggaaatggtacttcaatactaatattcgttaatataatttcgagagttccagcaacaattgcttcaatgatgacacttcagcaagcaggaagtgcaagtattgtggaaattgtactatttggagtatttaccgtatttctacttgctactatactatatttttctttatcagaaagaaggatacctgtgcagtatgctggtaaatttgcatcaggcaatagtaatatggttaaatcacaatcaacacatataccattaagtataattggatcagcggttcttgctattatattttctatgtccgtaatggattttccaaaaactattgccacattatttggtggagtaggtgaaagtcaaaaagagtgggcaaagtgggtattaaataatcctacatctatctttaataataagagttggatgtatatggtactatatgcagtactgacaatattctttaattggttttatactcagattacatttaaaccagatgaaatgtctgagaatttgcataaatcagcaggatttgtgcctggagtaagaccaggtgaagaaaccacaacatattttgaaagagttttaaacagactatcttttattggaggtatattagcagcggtattggctgtaactccagttatgatacaaaattatacacaatttcaaaatatagctttttcgggaactggattattaattgttataaatgttgcgttagattttactagaaaagtagaatcacaaatggtagttaggcactataaaggatttcttaaatagattagaataaatggagatgaagccagtgaagatagtattactaggtcctcctggagctggaaagggaacacaggctaaatcaattagcaataaatattcaataccacatatttctacaggtgatattttcagaaagaatatttctgaaaacactcccttaggaatagaagcaaagggttatattgataacggacaattagttcctgatgaagtaacaattaatatggttaaggatagactgcaacaggacgattgtaaggtcggatatttattagatggttttcctagaactgtggctcaagctgatgctcttaacaactttcttgtagataagaatgaacaattagataccgcattgcttataaaggtacctaatgaatttattctagaaagaatgactggcagaagagtatgtccatcatgcggagcaagttatcatgttaaatttaatcctccaacaaatgaaggaaaatgtgatttgtgtggaagtgaagttatacagagaaaagatgatacagttgagactgtaaaggaaagacttgatgtatatcaaaaggaaacacaaccgctaattgaattttacggtgaaaaaggcttgctttcagaagttgatggcacaaaagctattaatgaagtttttagaggaatatgtgaattgttagggaacaacaaataatgattactgtaaagaatcatgatgaaatagccataatgagaaaagcaggtagaatagtaggagaaacattgctattgcttgaaaaagaggtaaaacccggagtaataactgcaagtttggatagaatagcagaagaatttataactaagcatggagcaaaaccttcatttaaaggcttatatggttttccttcgtcactatgtatttcagtaaatgagcaagtaatacatggattcccaggagaatatgttcttaaagaaggcgatatagttagtattgactgtggggcgttttttgatggattccatggagatgctgcaagaactttctctgtaggggaagtttcagtagaagctcaaagattaattgatataacaagagaaagttttttccaaggtataaagtttgcaaaacaaggaaataaattaactgatatatcacatgagatacaaagctacgtagaagcagcaggtttctcagttgtaagagattttgtaggtcatgggattgggcgaaaagttcatgaggatcctaatgtacctaatttcggaaagtctggtagaggtccgaaattactggagggtatggtgttagcaatagaacctatggttaacgctggtacttataaggttaagacattaaaagatggatggacagttgtaacagcagatacttctttatcggcacattatgaaaatacagttgcaattttatcagatggacctgaaatattaacactgattaagtagaataaagagtgttgcttagttataaatttgcataataccgttgtggtagtgttaatttatactaaggtaatcatagaggtgaaaaatttgcaaaacaatgacttgattggaaaagtagtactttcaaaagcaggaagagataaagatcacttatatgttgttgttaggcagatagatgatgattatgtattactagctaatggagatacaaaattaattgagatgcctaagaagaaaaaaattaaacacttaagtattttagaagatgtagatgatgaattattatcattaataaactcatgcgataagagtactaatttaaagattaagagattcctaaagcttagaggcattgttaaggagggttgattaccttatgtcaaaagatgatgttatagaaatgcaaggtacggtattagaatctttaccaaacgctatgtttcaagttgaacttgaaagtggccataagattctagcacatatatcaggtaaattaagaatgaacttcataagaattttaccaggagataaagttacagtagaactttctccttatgatttaaccagaggtagaattacatggagagcaaaataaagtagatataacttacattgatctactacaaaagtaatatgaggagggttagctatgaaagtaagaccatcagttaagcctatttgtgaaaagtgcaaagtaatcagaagaaaaggaaaagtaatggtaatctgtgaaaatcctaagcacaagcaaaagcaaggctaatgatcaagtttacaatattatttacattaaaataaatgtaaataatattgacatttcagcaaaagtcaaatatgattatatagtcgtttaattaatcaaaaataaattttagggcggctggcaatagaatcgtctattgacctaaaattttattataaattataaatcataaattataaaatcaacttttatacatttcaattatcaggaggtgtaaattttaatggcaagaatatcaggtattgatctaccaagagaaaaaagagttgaaataggtttaacatatatatatggaataggattatcaacttcacaaaaaatcttagctgtaacaggaattaatccagatacaagagttaaggatttatcagaagaagaagttaatgaaatcagaacttatatcaacaagaatttaatggttgaaggtgacttaagaagagatgtcgctttaaatatcaagagattagtagaaataggatcatatagaggaattagacatagaagaggtcttccagtaagaggacaaaaaactaagactaatgcaagaactagaaaaggtcctaagaagacaatagcaaataagaagaaatagtaaggagggaagataatggcagctaaaacagtaaagaaaactagaagaagaaaagaaagaaaaaatgttgagcatggtgctgcacacattaagtcaacttttaataattcaatagttactttaacagatgcagtaggaaatgctttatcatggtcaagtgcaggagcactaggtttcagaggatcaagaaagagcacaccatttgcagctcaaatggcagcagaaactgcagctaaagtagcaatggaacacggcttaaaaagtatagaggtttatgttaaaggacctggttcaggaagagaagcagctataagatccttacaagcagcaggactagaagtaactttgattaaagatgttactccaataccacataatggttgtagaccaccaaagagaagaagagtctaatataaatgtagtaataggaggtgtaatttaatggcaagatatactggcgctacatgtagattatgtagaagagaaggtatgaaacttttccttaaaggtgatagatgttttacagataagtgtgctttcgttagaagaagctatgcaccaggacaacatggagctaacaaaaagaaagtatcaaactatggtgttcaattaagagaaaagcaaaaagcaagaagaatttatggcatattagaaggccaatttagaacatattatgaaaaagctgagcatattaaaggtataacaggtgaaaacttacttaaattactagaaatgagacttgataacatagtttatagattaggttatggttcatcaagaaatgaggcaagacaattagtaactcacggacatttcttagtaaatggtaaaaaggttgacatttgttcatatcatgtttcagttaatgatgtaattactgtatgcgaaaagagcagatcaagtgaaaagtttaaaacttttgttgaaaatccaaaaactttaccaaaatggttagaagctaatgttgataactatgaaggaaaagtagttgcagagccatcaagagaagatatagatgtgcctgttaacgaaacacttattgttgagttatacagtaaataatatatttatatttgttagagaaatttatcacaatatatgcaaatatagaatcagttgccctcataataaggttgccatttttaaaataaggagggtttgtcaatgttagaaatcgaaaagccaataatagaatgtatagaagctaatgaagatggtacttatggtaagtacgttgttgaaccacttgaaagaggatacggtattacattaggaaatgccctaagaagaatactattatcatcccttccaggagttgcaacaacctctgtcaaaattgacggtgtgcttcatgagttttctactgttcaaggagttaaagaagatgttactgaattaattcttaatatcaaatcattagctctaagaatgaatggtgaaggtccaaaagttatttatattgatgctaaaggaccaggagaagttactggagcagatataaagactgatggtgatgttgaagttgttaataagaatttacatattgcaactttagataacgatggaagactttatatggaattgacagttaataaaggaagaggatatgttactcagaataaaaataagagtgatgaattaccaatttctgctatagcagttgattctatttatacaccagtaaaaagagttaattttactgttgataatacaagagttggtcaaattactgattatgataaattaactttagaaatttggactaatggtactataaaaatagatgaagctattagtttatcagcaaaaatacttattgaacactttaaattattcatgtcattaacagataatactaatgacgttgaaataatgatagaaaaagaagacgataagaaagaaaaagtcctagaaatgactgtagaagaacttgatttatcagttagatcatataactgtttaaaaagagccggaattaatacagtccaagaacttgctacaaaatctatggatgatatgatgaaagtaaggaatctaggaaagaaatctttagaagaagttgaaagaaagcttaaagaattaggtttagccctaaaactaaccgaggagtaaggaggtaaatccatggcaggtcatcgtaaattaggtcttcctacagaccaaagaagagctatgctaagaaatcttgttactagtctattaaaacatggtaaaatcgagacaactgaaacaagagctaaagaaactagatcaatagcagaaaaaatgattactcttggaaaaagaggagatcttcatgctagaagacaagtattatcttatgttcaagaagaattagttgttaagaatttatttgataatgtagctccaaagtatactgaaagaaatggcggatatacaagaataattaaaaaaggtcctagaagaggggacggagctgagatagtaatacttgaattagtataatactaatgggggattaagtttaaacttaatccccattttgacatagaaaataaaattggaacttaatttattatagagatgttttcttactcaagatatatatttttttgttgaatatgttggattttgagatataatgaaaataataatttaatatcaaagataacaatgttgtttttgaaaaacatttgtataatatattaaaactataaaacatcatggggaggtacactatgagtgatgcgatgataaagtgtgcaaaagtatcttttaaatatgtaaaggatacagaaggagttaagcaagaaaaatatgcaataaaagatgtagatttggaggtaaaaaagggggagtttttagtagttttaggtcataatggatcaggtaaatcaacgatagctaagcatatgaatgcattggtcgtaccatcagagggaacagtgattgtagatggcttggatactagtaaaatggagaatgtttgggagattagatctagagcaggaatggtgtttcaaaatcctgataaccaattagttgctaccatagtagaagaagatgtagcttttggaccagagaatttaggaatagaacctttagagataagaaaaagagtcgatgaaagcctggagaaggttggaatgagcaaatataaaaggcatgcaccacatcttttatctggtgggcaaaagcaaagaattgctatagcagggatacttgcaatacaacccgaatgtataattttcgatgagccgacagcaatgttggatccatcaggaagaagggaagttctaaaaaccataaatgaattaaataaaattcatggtattactattgtattaataacacattacatggatgaggcagctcaagctgatagaattgtagtaatggatggtggaagtgtaaaaatggaggggactcctagagaaatttttcctcaggtagagcgaatgaaaaaaatagggttagatgttccacaggttactgaattagcttatgagctaaaaaaggcaggaatagatataaatgaaaaaatattaaatgtggatgagatggtgaatgaattatgtcaattaaagtagaaaatttaacacacatatatatgcctaagagtccatttgaaaagactgcattagacaatgtgtctttagaaataaaagatggagaatttgtagcactaattgggcatactggctctggtaaatctactttaatacaacattttaatggtttactagaagcaactagtggagaaataattgttgatggaataaatattactgataaaaaagcaaagcttacggatataagaaaaaaggttggcttggtatttcagtatccagaatatcaaatctttgaggaaactatagctaaggatattgaatttgggcctagaaatttaggactttctgatagcgaaattaataatagagtaattagggctatggaaatggttggtctggactatgagacttataaagataggtctccatttgacttaagcggcggccagaagagaagagtagcaattgcaggggttatagcaatgcaacctacaacactaatattggatgagcctacggcaggattagatccaaagggtagagatgatatattaaatcagataagaaagctacatgaggattataatatgactataattatagttagtcatagtatggaggatgttgcaaagattgcagaaagaattattgtgatgaatggtgggaaagtagcattacaaggaactccagcagaagtatttaaagaagttgatgtgctagagaagataggacttggtgtccctcaggtaacatatctaataagagaactaagaaaaaaaggatttgacattccagataatatatttacgatagaggaagcaaaaaagcaacttttgtctactttgaggataaataaagtgaaaggggaatagacaaaattatgttgaagaatattacaataggacaatatttacctggagagtcatttgttcataagttagatcctagaacaaagatccttatatcaatactttttattgcatgtttatttatcataaataaatttataggttatacttttgttgttgtttttttactagctataatattgatcgcaaaggtgccatttagatttatttttaatggattgaagccaattttcctattgatagtcttaacagctgctctaaatatatttatggttaggggcgctgaagggacagaagtttttagtattggatttttaaaggcatatccggaggggttaagtattgcagcatttatggcaataagactaattctattaatagtaggaacatcactgttaacattaacaacatctccaattgagttaactgatggaatcgaaaaattattacggccgattggaaaagaaatggctcatgaacttgctatgatgatgacaatagccttacgatttatacctactttaatagatgaaacggataaaataattaaagctcagaaggctagaggggctgattttgagtcaggcggaataataaaaaaggctaagagcttagtaccactattagtgcctttatttatcagttcatttagaagagcagatgaattagcaatggcaatggaagcaagaggctatagaggtggtgctgggcgaactagaatgaaaatacttgaattttcgtatagggacttggttgcttttattgtattttgtattttagttttatggtgcatagctgtaagatttattatgctataggagtaagataacttaaatgagaaatataaaattaattattgagtttgatggaagtaacttttgcggatggcaaaggcaacccaaaggcagaactattcaaaaagtaatagagacagcaatatttaaggctactggagaggaaattatgattaatggaagttccaggactgatgcgggtgttcacgcaagagaaatggttgcaaactttttgactaattcttcaatacctggagataagtttagagaagctattaatacaagactgccagaagatgtatctataattaaatcagaagaagtaagtgaagattttcatgcaagatattcatcaaagggaaagacatactcttatacaattataaatagatatgaaaggttatctttaggtcaccaatatctgtatcattataagtatagattggatgtaaatgagatgagaagagcatgtgaatattttatagggaggcatgactttagggcgtttatgtctccaggaagctcaataaaaactacaacaagaactattcatgatctatatatagatcaaaatggaaatgaaataaaaatatttattacggctgatggatttttgtataatatggtgagaataatagtaggtacattaataaagattggaaatggaaaactagaagtggaaaatataaaagatataatagaagaaggaaatagaaaaaaagcaggaatgtgcgtaccgccaaacggattaatattagaaaaagttttctattaaatgataaaaatgtgttgacacgcccgtgtgcgtgtattataataggtttgtttgttaaaacatttatgtatataagatccactagccccgggtcttgacataaaaaatcttacttaaaataataagtaaagaattaatgtaagttcagggagggaaacagatgaaatcatacattgctaaagcaagtgaaattgaaagaaaatggtatgtagttgatgctgctggtaagccactaggtagagttgctagccaagttgcttcaattttaagaggtaaaaataaaccaacatttacacctaatgttgactgcggagattttgttattgtaattaatgcagaaaaggtagttttaactggtaagaaattagatcaaaaattaatgagaaagcatagtctttacccaggcggattaaaagaaactccttatagagtagtattagataaaaagcctgaatttgcttttgaagaagcagtaagaagaatgcttccaaacggtgttttaggaagacaaatgttaaagaaattaaatgtatatagaggtgcagaacataatcatgcagctcaaaaaccagaagtactagaattaagatactaatacgatctcgggaggaggaaaaagaaatggcaaaagttcaatacatgggaactggaagaagaaagaaatcagttgcaagagtaagacttgtaccaggaagtggtaaggttcttgtaaataaaagagaaatagaaaacttttttggtttagaaacattaagagttatcgtaaaccaaccattagttttaactggaactaaggatagatttgacgttttagtaaatgttcacggtggtggatttacaggtcaagcaggagctattagacatggtatagctagagcattagttaaatctgatgaagctttaaagccagaattaaagaaggctggattcttaacaagagacccaagaatgaaagaaagaaagaaatacggtcttaaagcagcaagaagagctccacaattctcaaagagataatatttggagatcaaaaatcccacaaacgcggtgtttgtgggatttttattttatataaaaatatgtaatcttaaagaacaaatataaataatagttattacatttctagtaatacggttctggtgccacttcctaatatagttataaactcttctattatatatatatatgttcaagctaagcctatatattttgccttaaatgaattctttagctattacaagtctaaatatagctctattatatacaatatatattcatgtatatataagttctaaatggtataattcattttttataaaattattaacatttctatatatggtaattacagatggatttcaattgattaaatattttagatattatattaaaaattgtggtgatgcatctattgggtgttctataaaatatgtttaacaaaaaataaaagtttattaatataaatgaatttgaataattaagattgtatagcaaacaatacagtatgtaagtctaaatgatttggaggaacagttttatgagaatgaaaaaatggatagcattgttctgcatattttgcttaatgtctggaattccggtaaggacaaattccgaagaaaataaagataaaaggataatattaatagatcctggacatggaggaattgacggtggagcaaaatcaaagagtggaactatagagaaggatataaatctatctatatctttaaagttaaaaaaggagttggaggactctggatatgctgtgtatatgacaagagaaggggattcacaattagatgcgaagaaagttaaagatcttaatgccagatgtcaaatgaagaaggatgttaaatgtgatgcatttatatctatacatcagaatatgtttccacagtccagttgctttgggtctcaagtttggtattcatctaatgagatcagcaagtctttagcagaaaatattcaagtatcactcaaagaaacaataaatgataacaataagagagttcctaaggctgcaaaggaacaatatagaatacttagagatggatatgagggtgcatgcgttctcgtagaatgtggctttttatctaattatgaggaagagcaaaaactaaaaagcgatgaacatcaggacaaaatagcaaaaggaataacagctggtatcaataaatattttgaaagtaaagatagctagttatttaatttcataagaataggaccaacttttatgctgttttttggatagtcataagcgtggtataatttgtctactaataaaaaaagattatacaatagcaaacaggttaaaagaacaattaaaaagtaaattagtatacttaggaatttatctaaatttttagggttcataaattaacctctcaaatatataaaataattatatatgttgcaattgaattcctgcatttttgaaattcaatacttggcttacaagtattttaaatgtaagccagttattgcaacatatatatataattatagtagtaatgaactataattatgagcgataaatttaaaaatagagaaagtatttagtaatattaagcagaaaaatactaaaaatcatcatagagaatgctccgtttatgattatgatgtacagtatataccgcaattgcttgtatggagctttgagaattattggattaaataaaatttatttggggttgtaaatagtaagaaatacttttaaacttatatgtagtaataagtttaaatgtatagtttataagcgataataaaggagctgtaagaatgagagaaataaatgttgaacttataacagaagctattaaaaatttatcaattgaagctaattatttcttgggatcagatattaatgatgcattattaaatgctaagaaagaagaaccatggaaattagcatccgatgttttagataagatattaataaattcagaaattgcaagaaatgaaaaaatgcctatgtgccaagatacgggaatggcatgtgtatttattgaaataggacaagatgtccatttagttggcggaaggattgaagatgctattaatgaaggcgtacgtaggggatatgaggaaggatttctaagaaaatcggtagtgaaagatccgataagaagagttaatacaaaggacaacactccagctataatatattatgacatagtggatggtgataaggttaagatcatattagcaccaaagggatttggttctgaaaatatgagcagaataggtatgttaaagccatcagatggactggatggagtgaagaagttcataatagatacagttaaagcggcaggacctaacccatgccctcctatggtaataggtgttggaattggagggacttttgataaggcagcatacttagctaaaaaagcattattaagacctatcaatataaggaatgaagatgaattttacaaggaattagaattggaactattacaagaagtaaataaattaggaattggaccacaaggattcggaggtaaaacaactgcattagggttaaatatagagacttattcaactcatattgcggggttacctgttgcggtaaatataaattgtcatgctactagacataaagaggtaatactataaaaactatgatttaaataagatatatataagttctaaataacatagctaattctttatgaattgcctaactttcattatttgactatttaagatgaagctttgatgaattaaattttttagagttatatattttattaaaagtctaattggtaagaatgtattagaaataaaaattgaaattatatgtatgattggagaaaaggtatggaaattaaattagagacacctcttaatgaagaaaagataagacaattaaaagcaggagatagtattttgttaagtgggataatatattctgctagagatgccgcacataaaagattaatagaattgcttgatgaagggaaggaactgccttttaatataaaagatcaggttatatactatgtaggaccatcaccagctaagccagggactgttatagggtctgctggtccaacaactagctacagaatggatgcttatgcacctaaattaatggacattggactaaaaggaatgataggtaaaggtgcaagaaacgatgaagtaattagttcaatcaaaaggaatgaggcagtatactttggagcaattggaggagcagctgcattaataggaaaaagtattattaagtctgaaataatcgcttatgaagatttaggagctgaggctataagaaaaatggaggttaaggatatgcctctagttgttattatcgatgctcaaggaaataacttatatgaaattggtcaaagagaatatttagattcggtaaaataaattggagttatatattaagccgtattaaaaggagaaatatatgagtagaattaagttaccaggaaaagagaaaaataaaagaatactattatttgtactagtgttaatagcattggggataatagctcatgaatttatagaaaatagaaatagcaaggataataaatataaagaagaaaaagaaatagtaatgcctgagggaactcagcaatcagataataatgtagccaataaagaactagaaagtatagatatgaagaatgattctaaaaaggctgttgatgataaaacaaatgaaaagtctagttattctgaaagggaaaatgaattatacgacgaagcatataatttatttttttcacataagtacattgagtcaataagcaaagcagatttgcttataagtgaatttccaagtaatgcaatgggatataatataagaggaattgcgaagtcttataatggagattttaatagtggtatagatgatatagataaggcattaagtattgataataactatggatatgcaaggtttaataaggcacttacatatgaattatatggaaaaatggatgacgcacttgaatggtataataaggctttagatgttgaagattatgaatggagttattatggtatagcatctatttatggaagaagaggagacataaaaaatacaatgctgtatttgaataaagcaatacaaatggatgcatcaataaaggaaatagcaaaagaagaacatgattttgatacagttaaaaattcagaagaatttaaaaaagcagtgtataattaatatttagaagataagttcattgtaaaacaatattatgtgagacgtgaactttaggaggaatttgtatgttcaatgtattagtagttgatgacgaaaaggaaatacgagatgcaattgaaatatatttaagaggcgaaaatttaaaagtatttaaggctgaggatggattggaagctttagatattcttgaaaaagaaaaaatacatttaattatactagatataatgatgcctagatttgatgggatacgtacttgtttaaagataagagaaagtcaaaacttacctataataatgttatctgcaaagggcgaagattcagataaaatattaggattaaatgtaggggcggatgattatataactaaaccattcaaccacttagaattggtagcaagagttaaatctcaattaagaagatatgagaaaccgctaaatgtagaagagggtaaggatataattaaagttaaagatttggtaatagatactgttgcaaaaaaaattactttgcgaggagaagatgttaaggtaacagctacagaatacaagatattatatttgctagcatcaaacttaggaaaagtattttctattaaagagatatacgaacacgtatgggaagagatattttacaaaagtgaaaatacggtaaccgtacatattaggagaataagagaaaaaattgaaataaacacaaaagagcctgaatatatcaaggtggtgtgggggattggatacaagattgaaaaggaagattaagatatattttagtagcatctatttagtagatataataattgtagcattgataacattatttttactttcagcattgggtgattatatacagattaataggtcgcaacacagtttagcagttaatagaattaaaagtgatttaagaggactacttttcttagctgttatgtatgtggcgtttattacaaagattattttcatattgaaaaagaatcaaaattcacctagaatacaatccgattttgttaataatgtgatttttgtaattaaaaatggatttcattataaagaaacaaggagcaaattaataatatctattgcattagcattgatattgttaattgcatatttatattttcttgctactggaggatatgaaaataatatatttgtgaagttttttcaaacgtatccgtttaaaggaagtgtatttgttattataatcttatttttcactatgatgtatgcattaaagaagaccctagacataatagtggtaaatgatgcacttagaagagttagtgaagggaatttacaagatgatattaaattagatgggtctcctgcgataaaagagcttgcaaaaaatattaacttaataaaagcgggatataaggaaatattagaagatggtgtccacaatgagaaactgaaaacagaactaatatcgaatgtatcgcatgacttaaagacgcctttaacatcaattataaattatgttaacatactaaagaatagtgatataacagaggaagaaagagaagagtacttattaatattagagagaaagtcgctaaaattaaaagtattaattgaagatttatttgaaatgtcaaaaatcaatagtgggaaaattaagttaaatagagagttaatagacatactatcattaatacatcaaggtataggtgaatatagtactttatatgaggaaaaaaatatttcatttaaagtgactagtgaagaagatgctgtatatatggaacttgatggaaagatgatgtcaagagccttagaaaatataataattaatgcactaaagtattcaatgagcaatactagggtttatattaatgtaaaaatagatggtgattatgttaatgtcggcgtgaaaaatattgctaattacgaaatggattttaatgaatacgaaatgtttgaaagatttgcaagaggggataagtctagaaattctaaagtagagggttctggactaggtctagcaatcacaaagagtatagttgaacttcatggtggagaagttaaaataaaaaaagaaggagatatgtttaaaatttatcttatgcttccaataaataagggataaaaaatattaataaataaattttatcaattaggtagttaatctatagaaaactaaagattagctacttttttcatatatatctataaattttaaggttttacaattatgatgctaacaattataatatacgatatgttgtatagaagaattaaattacatacaaaaaacacaatatgtagtagggagagataattgaatgtcgcttttgagtgaattatgcaaagatgctattaatacaattaaagataatgagggactttatacagaagataaattattagatgctttaaatccaattgtaagaaaagatatgaataaaagagaaataagaaattcattgatacaagtagcgctggaattaactacagatatggagcctaattggcaatatgtagcagctagggcgtatacatatgaactttatgatagagttagaagttctagaaatttagaggatgataagaatttataccaggattattacgaatttattgaatctctaactgaaagaggtctttatggagaatatattttaaagaattactcaagagaagatattttagaactggagaaggatataaagccggaaagggattttctatttaattatagtggaatcaatcttttagcaagtagatatttagttcaagattataatagaagccctatagagcttcctcagcaaatgtttatgggaatagctatgcatcttgcaattccagagaaagaggaaaatagagtatattgggccaagagattctatgatgtacttagttcgttaaaagccactatggcaactccaacaatgtctaatgcacgaaagccattttatcaattaagttcatgctttatagattcagtggaagatagtttagagggaatctataaatcccttgataatttcgctaaagtatctaaatttggtggtggaatgggtatatatatgggaaaaattagagcattaggttcaccaatcagaggatttaagggagcatctggaggggtaataccgtgggttaaattatttaatgatacagcaatagctgtagatcagttaggtgtgagaaatggctcggtggcaatatggttagatgcatggcataaggatattcctgagtttcttcaaataaggactaataatggggatgataggaaaaaggcacatgacgtatttccaggtatatgctatccagatctattttggaggcttgctgaaaatgatatagatgccaattggcatatgatgtgtccacatgagattaagaacattaaaggatatgcattagaagacttttatggagagcaatgggaagaaaagtattatgaatgtgtaagcgatgagcgaatagagaaaagagtaatgtcagtaaaagatttagtgagattaatcataaagagtgcagttgaaacaggagcaccattcgcattttatagagatatgacaaataaaatgaatcctaataagcataacggaatgatatattcatcaaatttatgtactgaaattatgcagaatatgagtccgatgaagatacaaaaaagtcaaattcttagtgataaagatgaatatgctgtggttgagaaaataataccaggagattttgttgtatgtaatctttcatcagtagtacttggaaatatagatgtatgtaatgatgaagaagtagaatatgttgttgaaactcagattagagcaatggataatgtaattgacttaaactattattcagttccttttgctgagattacgaacaaaaagtatagggcaataggtcttggaactagtggatatcatcatatgcttgttaacaataagatacattggacggaagaagaacataaaagttttgtggataaaatttatgagaagataaactactatgctataaaagccagtatgaacatatcaaaagaaaagggattctatgaattgtttaagggatctgattgggatactggagagtatttcagattaagaaactacaatagcgctaaatggaatgaactaaaggagctagttcatgaatttggaactagaaatggatatttaattgcagtagcaccaaatggctcgacggcaacaattgcaggaacaacagaaggaattgatcctattatggcaagattctatctagaagaaaaaaagggaagtataattcctaagactgcaccaaatctttcagaagataattattggtattataattcggcttataatatagaacaaatgtggtgtgttaaaatgaacggaatacgtcaaaggcatatagatcaaggtcaatcctttaatctttatataacgagtagctatacaatgaggcaaataatgaacttatatatagaggcatgtaaatgtggcgttaaatctatatattatgtcagatcaaaatcattagaagtgacagaatgtgaaacttgttcagcgtaagtgtactttataatctatgtatcaatacttagcatcagaggttatacatagtgagattgataaacgagaactcaaattttatatttgagttctcaagttaatttagttctttgatactacttggttatttgaacttatgaaaaataaaatatatgaataattatgatatatttagatataaaatttttagaattaattgctatataactaacacatgttagctatataatgcttagagaataggagtgcagatatgactataaataaaaaacctctttttaatgagttgggagatagagaaatcagtaaaaagagaattataaacggtaatactacaaatttaaatgattttaataatatgaaatatagctgggtttcagactggtataggcaaggaatgaataatttctggataccggaggaagtaaatctttcacaagatttaaaggattatcaaaacctattagaagaagaaagaattgcatatgataagatattgtcattcttaatatttctagattctatacaaacagcaaacttaagtaatataaataattatattacagcaagtgagataaatctgtgtttaacaattcaaagttttcaagaagcagtacattcgcaaagctatagctacatgcttgatagcatatgttctcctgaaaaaaggaatgaaatattatatcaatggaaagatgatgatatactcttgaaaagaaataaattcataggagacttatacaatgaatttatagagaatccaacggaatacaatttattaagaacacttatggctaattacatattagaaggtatatatttttattctggatttatgttcttctataacctggagagaaatggtaagatgccaggatcagcacaagaaattaggtatataaatagggatgaaaatactcatctgtggctttttagaaatattataaaagagctacaaaatgaaaatccggagctatttactgaagaagtaaaaaatgaattaagaaatatgatgaagattggtgtagaacaagaaattttatgggggcattatgttataggagataagatacaaggaataaataagcaattaattgaaaattatataaaatatttaggaaataaaagattaaaagaaataaatttatctccattattcaaagagcaagataagaacccagcttcatgggtagatactctatcaaatgcaaattctgttaaaactgatttcttcgaagcaagatctactgcgtatgcaaaagtgacaactttgattgatgatttataaatagatttataaaatataaaaataatagggaatagatggtaatagataaatggagagatactttttttagtaaaaatcataaaaaacgattaaatttaagttaatttttttgtgaattatgttataatagaaaaggtttatacttaaaataaaacttgcaaatacacgaattaatgtaagaaatacttacttaataaatgaaatttacaatcaaggaggagttccatattatgaaaaaaggtattgctgcttctaaaggatatgcaataggaaaagtatttttacaagagcatgaggaaatcattataaatgacagtaaaattgcagatatagatgcagaaaaagcaaaaatgcaaaaagcattagatgattctaaagtacaattagaagctattaaagataaggcagaaaaagaaatgggtgcagagaaggcagctgtatttgaagcacacattacattattagatgacccagaatttactggagcaatgatgatggaaattgaaaataatagtataaatggattaaaggctattgagagtgttgcaaatacttttgttgctatatttgaatctatggataatgaatatatgagagaaagagctgctgatattaaagatgtatctaagagaatattatcaaattttgcaggtaagggcggagattcttttgcaattactgaagaaaatacagtagttgtagctcatgatttaactccatctgatacagcaggattagatagaactaaggttgttggatttataactaatataggtggaagaacttcacatgcagctataatggctagaactttagaaattccagcagtacttggattaggtgatataactacagctgttaaaacaggagatgcagttatagttgatggaataacaggagatgttattataaatccatcagaagaagttttagcagaatatagagagaaaaaagcaaaattccaagcagaacaagaagaattaaagaaattaatagatgttaaaacaactactaaatcaggtagaagaatagaagtttgcggaaacattggtaaaccagaagatgtactaggtgttttagcaaatggtggagacggtgttggattattcagaacagagtttttatacatggatagagatagtgctccaacagaagacgaacaatatgaatcatataaatttgttcttgaaaaaatggaaggtaagcaagttgttataagaactttagatatcggaggagataaaacgcttccatatttaccattaccagaagaaatgaatccattcttaggatatagagcaataagactttgtttagatagaaaagatatatttaaagttcagttaagagcattgcttagagcttctatatatggaaatcttgcagttatgttcccaatgatttctggattagaagaatttgagcaagcaagagaagttgttgaagaatgtaaggcagaattaaaagctgaaggaaaagaatactcagaaaagatccaatggggtataatggttgaaattccagcagcagcagtttatgcagatgaattagctaaacatgttgatttcttctcaataggaactaatgacttaattcaatacacattagcagctgatagaatgagcgaaaaagtttcatatctttataatccaatgcatccagcagtattaagattaataaagatgactattgatggagctcataaacatggtaaatgggttggaatgtgtggagaaatggctggagatgaagcagctatcccaacattagttgaatatggattagatgaattctcaatgagtgctacatcaatcttaaatgctaaaaagataatgttagaacaagaataatatatcgtttatataattaaggctatctcaaaattaattgaggtagctttaatttttatatttaattattataattgagtgcgatataatatatattatgaatcggtaaaacatattgcattaaaaattacaaaggggaattttatgaataaaaaggttaaaagggctcatgataaagctatgagttactatgagatgggacaaatagataaagctttagaaatatgtgaagatatattactagaaggtttggataacccaaatgtattgaactttaaagggctcttattatatcaaaagggtaatttagaagaagcagttacagtatggaagatgaatagtgatttaaataatgatgatattgcaaaaagttacataaatgattctattttagatagaaagagattagagttatataggcagggagaacaagcattaaagcagttaaaggttgataaagcattaaatatatttatgagatgtgcggaaagtgattttaatgctattaaggtgaatactggaattgctatgtgctatcaaaggaaaggtgatttctacagagcaagagaatatgcagagaaagtactaaatatcgataagaatgcaattacagcaaaaaaaatcgagaaagaattgaaagacagtggaacatttatagaggaaagaaactcctcaaaggggttatttggaataataattatggttatagtggccgctattgtagtgggtggatatacagctgtatcaaaatataagagtttaaataatactgttgaagaaacaacgaaagataaaagcgatattaataaagaagcttatacatatgaggaaaaggataataaagaatccactccagagacattaaaggaagaagtaaaagaggaacatgataatattaaatttaataaggataagatgatagcattaataaataataatgatttagatggtatatatgaacaaataaaggatattaaacaggaatctataagtagtgatgatcaaggagtatataagcaagctgttgatttaataaaagatcaaggagtttcaagattttatgaaaatggattaaagagttttaatgaaaataaatattcagatgctaaagtttttttagataaagcgtatgcatactgcgaagggaatagtttaaaagaacatatattattttatagagccagcagctcttcaaagctatctgacaactctgcagctgtaaagcaatatgaggaatattatagtcagtatcctaatggtgtatatgtagaagaagcactctataatctggcattattaaacagttctataaataaggataagagtaagcagtatgcaagtatactaataaataattatccagattcaatgtatgctaataataatataaaaaatataattaaggaataagaaataagtttcaaatttaaaattacttattcttcttaatttaaaagcaaattactgtcatattaatatatctattaggaaaagataatcacataatcggcatttttttattagatgtgatgatttagagtatttatttaaaataaaggataggtgagaatatgatttcaataattaaaggatgtaacgtgtatgcacctaaacaccttggaataaaagatgttgtgatagtcgggggcaaaatagaagggatatatgaaaatcttaatattaaaattgctccgatagatgttgaggttattgatggaagaaataaattactttttccagggtttatagacggtcatgttcacattataggtgctggaggcgaaggtggatataacacaagaactcctgaaatgccattatctagcttggttaaggcaggaataaccacggttgtaggatgtataggaacagatggaacatgcagaagcatgaaatcattgatagcaaaggtgaaagcactaaaacaagatggcatgtctgcatactgttttactggttcatatgagctgcctgttaagactgtaacagactcaattaagagcgatttaatgttgattgaagaaataatcggaataggggaaatagctatttcagatcatagaagttctcagcaagcctttgaagtatttgcaaatgcagtagcagaaagtagagttggaggtcttctatcaaataaatgtggaattgttaatatacatttaggtgaaggaaacaggaaattaaattatttatttgaattgctagataagacagaaattcctgagactcagttattgccgactcatatcaatagaaacggcaagctatttaaggaaggtttagagtatgttaaaagaggtggtttcattgatttaacaactagctgtgacctagagaatttaggagaaggtgaacttagagctggtgaaggattaaaaaaatacttagatgaaaaattacctatagatcatataactttcacttcagatggaaatggaagcatggagaaatttgataaggacggaaagttagaaggatatgaaatttgctcagtttcaacattatatagggaaattaaatatgcaattactgaacaaaatgtgccaattgaagacgctattaaagtagtaacatcgaacgttgcagcaatcatgaaattagctaataagggcgcaattgagtcaggaaaagatgcggatttattgatagtggacaaaaaatctttagatatagaaatggtttttgcaaatggaaagaaaatgatggagaatggagaagtgattgtaaaaggattttttgaaaagtaattgcaataagagatgggttatatcatttttatttgatataacccattatttttaaatcaatatatagaggctacacttttactttgaaaaaagtgtgatgccctataattttttcgtttactttttgtgtttctttcatccaatgacatgttgcggtagccggattatagaaaaataaggcatcatttgttggatcagcgcccctaatcgcatcgtatactgcattatagcaatcttgatctggattagcagttattttaccattcttaacgcatgaaaaggcatttttttggaatataacttctctaatagtatttggaaaatgaggatcaatagtacgatttaatactacagaagctacagcaacctttccagcatatggttcaccaccactttcagcagatacaagttttgccattagatctatatcttcacccgttatatataattgttgagtatcatgtttgaaaacttctaaaacttcgttgtttttctcatcagactgagaattgtttatattagcacttaagtagtttactttcatttttggattttcataagtagtcttaatttcaccatgagatccagctaaattagatgcgaatgctggattcatattaataacggaaagatatagtattaacgcagttacaaaaatactatatgtctttttcataaaaaacctccttcggtataatgcaacaaataatattattgccaaagaaagtaattatatacactatttattcgtataatcatttataggattttataacgatataaactataattaattaatagtaataaaaaattactataaaaataattaaaaagtaagaaaataataattctctttatatctaatatcatagtatttgttgtataattttattgtgagagaaaaagaggtgagaagaaatttgcaagaacttttaacaatgttaataaaaagcttttctaatatatcgatatggtccatattagatatactagtagtgtcctatatattttataaaggatatatgttaataaaggaaacaagggcagaacaattattaaagggaatagtattaattatagcacttattccaatcagttatttattaaagttagatatgttatattttatattaaataagacattaaccatcggggtattatctgtagttataatttttcaaccggagattagaagggctttagaacatttgggaagaagtgctttcgatgatcattatcttaataatagagaagattttaatactatgattaatgaaattacaattgctgtacaaaacttagcggaaagcaaaacaggagctctaattgtaatggagcaaagtacaggtttaaatgaattaattggtgcaggaacagtattagatgccaaaatcacctcgaatcttttggaaaatatatttgttgttaatactcctctacatgatggagcaacaataataagaaataatagaattttggcatctggatgcgttttaccgcttactagtaataattctataaataagaaattaggaacaaggcatagggcagcgataggtttatcagaagtatctgatgcgctagttataatcgtatctgaagaaactggtgtagtatcgctagcgatcaatggaaaaattacaagaggttatgataaagatagattaaagcttatactaacgaaggtagtagaaaatagaaaccagaaaagagttaaaacggcgggagagaaggtgaggtcatggataaaagtgaaaacggaacgttaattgttaaaattatttgtttactgttatcagtggttctgtggctatatatctcgaatgttgagaacccacttaggacttatgaattaaaaggaataccagtagaattaactaatgaggattccttagtagattcaaaattcgcaattgtaaataaacagccatttacggtggatttaaaattagaggggccatcaagtgaaatattaaaggtgaagaaagaagattttaagattgtagctgatatgtcggcttatgcacttaaagtaggggaaaatacaataccagtccaaataacgagttatcctgaaaatataactataaagaataatgggatgttaggtataaaagttaacctagaggaattgactcaaaaggaacttacgataagctcaaaagtaaaagtaacttataaagagaatatttatgaaaaagagcaaaatataaatcctaataccgtaacaataacaggggggaaaagttccgtagataaggttactgaagctattctgactggcgaagaaaaagatgtagataaaaataagcaaggtgattataatatacaatttatagactcatttggaaatgcagttagcaatattgaatctaatataaaaactgcaaagctatcaattacggttacgaatgggaagacagtgccagttaatgtaaagactacgggaaatgtacctcaaggatttgttttagatgggtatgaattaagtaaaaataatgtaactgtattaggcgatagtcaggttttaaataagttggagtcaatagatacagaggccgtggacatgtcgtcattgcagcctgatagtgaagtcgatgtcaaacttaacttgccagaaggtatttcgataagtgatggagaagcatcaattaaggctaaatttaaattaaagaaggaagagaatacaactaaaaatatagaatgtaatgttcagtacaagaatttaagtgatatatttttggttacaaatcaaagtttagtatccaatgtaaaattatcaggtacacaagaagcattagataagataagttcacaaaatataagtgtaatactagatttagctaatgtaaaagaagaaggtacttttgattacacacctcaggcaacacttgttaatgctaataatgtaacagtatcagatgttggaactgttagtgtaacaataaagaaaaaaggataataataaaatcacagtattaattaatttgttaatactgtgattttttatgatataatttctttgaattagtttgcagtaaggtaggatgggaaataataaataaaatatgaagtttgattgaatagatatataattatagattgtttgttgaaaggatatggtgataagtctgtggctataagaataaataatataaatctgagtttagacgatgatttaaatgttttagagaaaaaaatatgtaaaaagcttaatatgtcaaaagaagatattagcagattagatataatcaagagaagtatagatgcaagaaaaaagaatgatataaaagtaagctttagcgttaatgtattttgtaaaaaggagaaaatgttactatcaagaatacatgataaggatataagttttgaagaaattagagaaattgagtcaataaaaagtggtacagaagaaattaaagcaagaccagtagttgtaggattcgggccagcaggaatttttgcagcattaacattagcaaggtatggatataaaccaattgtgtatgaacgtggggaagatgtagataaaagaactgaaactgtggaaaagttttggaaggatggacgtcttaatttagaatcaaatgttcaatttggagaaggaggagcaggtgcattttctgatggaaaattaactacaagaattaaagatcacaggtgttcatttgttcttgatgaactaataaaggcgggggcgccagcagaaattaaatatgagagcaaagctcatgttggaacagatcttttaaaaggtgtggttaagaatatcagagaagaaataaagagacttggaggagaggttaactttaattctaagttagagaaaataacatataaagatggaaagttagagagcatagttgtcaatggaaagaatattacatgtgaggctttagtgctagctatcggacatagttcaagagatacatatgaaatgttatatagagaaaatgtatcaatggatgcaaaggcatttgcaataggggtaaggattgaacatccacaagaattaataaatgttaaccaatatggcaacaatcataatcatcctaaattacatgcggcagattatagacttacatatcaaagtgaaaagctaaaaagaggtgtatattcattttgcatgtgccctggtggagtagtggttgcggcagcatcagaagaaggaagacttgtgtctaatggtatgagttatcacgcaagggatttagataatgcgaattcagcactagtggtgactgtctctccagaagattttaaaggaagctcaccccttagaggaatggaatttcaaaggcattatgaaagtttagcatttaagctaggtggtggaaattataaagcacctgttcaattagtaggagactttatgaaagatagagtgtcaactaagttgggtgaggtcatcccgagttatactgcagggtatgaattcagggaattaaaagaatgtttacctgattatgttgtagaggctcttaaagaaggaattataaattttgataaaaagataaaagggtatgcaagagaagatgcaattttaacgggaattgagacaagaacatcagcaccagttagattgaatagaaatgcttcacttgaaagtataaatgtatgcggactttatccaactggagaaggggcaggatttgcaggtggtataatatcagcggctgttgatgggataaaggttgccgaacatataattgaaaaattcgatttaccaaaataagattataagtaacatgaatagaattagtataatcttttcagaagatgaggaagatatattatattacgttcgtgttgtgaaatcttataaaaatgaatatataaaattaataatataataaaaataatattctgaaaattcaacatttccaatatttttttgttacaataaggtataaagaaatattcatagcattgattgatataaatttaacaaacaattaaattaatcatatataaaagttaaaaattattaaagtagaggtgcaaaaaatgagtaaaaactttgatgagttattatcaagattaaaggaagttccaacaaaaaaagtggctgtagccgtagcacaagatgaaccagtattagaggctataaaagaagctacagaaaataacatcgcacaagcaatattggttggtgataaacaacaaatccatgaaatcgcaaagaaaataaacttggacttatctgattatgaaataatggatattaaagatccaaagaaagcaacattagaagcagtaaaattagtttctagtggtcatgcagatatgttaatgaaaggtctagttgatactgcaacattcctaagaagcgtattaaacaaagaggttggtcttagaacaggaaaattaatgtcccatgtagctgtgtttgatgtggaaggttgggatagactgttatttttaactgatgcagcatttaatacatatccagaatttaaggataaagttggaatgataaataatgcagttgtagttgctcatgcatgtggaatagatgttccaagagtagcacctatatgcccagttgaagttgtaaatacaagtatgcaatcaacagttgatgcagcattgttagctaaaatgagtgacagggggcaaattaaaggatgcgtaattgatggaccttttgccttagataatgcaatatcagaagaagcagctcatcataaaggtgttacaggatcagtagcaggtaaagctgatatattattattaccaaatatagaagcagcaaatgtaatgtataaaacattaacatatttctctaaatcaagaaatggtggacttttagtaggtacatcagcaccagtaattttaacttcaagagcagattcattcgaaactaaagttaattcaattgctcttgcagcattagttgcagcaagaaataagtaataaatcaatccataataattaatgcataattaatggagagatttatatggaatttgcaatgcactattagattctataataatttcttctgaaaattatgcattatgactgtatagaatgcattaaatttaagggggattcagaatgtcatataagctattaataatcaatccaggttcaacatcaacaaagattggtgtttacgaaggagaaaaggaactatttgaagaaactttgagacacacaaatgaagaaataaagagatatgatacaatatatgatcaatttgaatttagaaaagaagttatattaaatgttcttaaagaaaagaattttgatataaagactctaagtgctattgttggtagaggtggaatgcttagaccagttgaaggtggaacatatgcagtaaatgatgcaatggttgaagatttaaaagttggagttcaaggacctcatgcttctaaccttggcggaataattgccaagtcaattggagatgaattaaatattccatcatttatagtagatccagttgttacagatgagttagcagatgtagcaagactatctggagtaccagaactaccaagaaaaagtaaattccatgctttaaatcaaaaagcggtagctaaaagatatggaaaagaaagtggacaaggatatgaaaacctaaatcttgtagttgtacatatgggtggaggcgtttcagttggtgctcacaatcatgggaaagttgtcgatgtaaataatgcattagatggagatggcccattctcaccagaaagagctggatcagttccaattggtgatttagttaaaatgtgttttagtggaaaatatagtgaagcagaagtatatggcaaggctgtaggaaaaggtggatttgttggttatctaaacacaaatgatgtaaaaggtgttattgataagatggaagaaggagataaagaatgtgaatcaatatacaaagcatttgtttatcaaatttcaaaagcaatcggagaaatgtcagttgtattagaaggtaaagttgatcaaattatttttaccggaggaattgcatactcaccaacacttgttccagaccttaaagcaaaagttgaatggatagccccagttacagtttatcctggagaagatgaattacttgctctagctcaaggtgctataagagtacttgatggagaagaacaagctaaggtttactagacgtaaagatgcacctagagatattttctaggtgtatttttttacataaaattcgcatatatatatcgctaaactgtggccaaatgatataataaaataatcgtaatgatatttagtaaagaataagtttaattggggtatgatatggatagatttaattgtattttgaatgacacagaatatatatattatttaaaaagaaataaaaagtttgaaaaagatagaaaattttgcaagcataatttaaaacactttttagatgtagcacgaatagcacaattaataaatctcgaagaaagtctaggatttaacaaagaaattatatatactactgcaattctccatgatataggaaagtcgcttcagtatgaaaatggaacacctcatgaaatatcatcatgggagatttcaaaagaaattttacataattacagatataatgaggaagaaattgaaattataaaacaaggaatactaggacacagagataaaaagagtgaaaactttgcacagctcatgtatagagcagataaactctcacggctatgcattagctgtaagtctattgatgaatgtaattggggagatgaaaagaaaaattttaaaatatattattaaaaggagctataaatcaatgaaaataggaagtaaggaatttaatataggggaaagaacatatattatgggaatattaaattttacgccagattctttctcagatggaggaaaatttaatgacattgatgttgctgtaaaacatgtgaaagaaatgatagataacggagctgacataatagatgtaggaggggaatctacaagaccgggatatgagatagtaagtgaagaagaagaaatttcaagagttgtacctataataaaagctataaaagaagattttgatataccagtatcaatagatacatacaaagctaaagttgcagagcaagcaatagaagctggtgcgaaccttattaatgatatatggggatttaaaaaagataaagatatggcaaaagttgcggcaaaatataatgtaccttgttgtctaatgcataatagagataatacagagtataaaaatttaatggaagatatattaaatgatttgaaagaatgtattaatattgctaaggatgctggagtaaaagatgaaaatataatactagatccaggtataggtttcggaaagacctatgaacaaaatttagaagctatgaataacttagaaagaatcaaagagttgggatatccgatattgcttggcacttccagaaagtctatgataggattagctcttaatttgcctgtagaggaaagaatagaggggacagttgcaacaacggttattggaataatgaaagatgcttgtgattttgtaagagttcatgatgtgcttgaaaattcaagagcagcaaagatgactgatataatcgtaagaagataggatggatgagttttggataagatgtatataagagaattagagttatttggctttcatggagttttcgaagaggaaaaaagattaggtcaaaagttcattttatcttttgaactagatatagatctaaaattagcaggaaaaactggagatttaactaaaacagttcattatggtgaattgtgtgaaaaaatagaagatgaatttaaaagaaagaactatgagcttatagaaacagcaactttaaatttagctgattttattcttaatgaatataagataatagaaggtgttaaggtgttcctaaaaaagccttgggcccctataaaaaaacatttagatactgtagaaataatgattgaaagaagaaggcacaaagcatatataagtttaggatctaatattgggaataaagaacaatatttagaggacgcaataaataaaatatctgcagaaaaaaatattgaaataataagaaagtcatcgtttattaaaacaaaaccatggggatacttagaacaggaagattttttaaatggtgttgtggaaatagaaactatattagaagcagaagaacttatggatgtactacttggaatcgaagcaaatctagatagaaagaggactataaaatggggacctagaactattgatctggatattattatatatgattcagtggtttcttcaaatgaaaaggtgattcttccacatccaagaatgcatgagagagaatttgtattaaaaccattaagtgaaatagcaccatatcttatgcatcctgtgctcaataagagagtattcactcttttagaggagttagagaaaaaggacaattaaaaacatgaaacagcttattataaggtaggggtaattttatgagaagttcactaaagtttactaacaaattaaatatgttatctgaaatggaatgtgaatcaaagtttcaaatattggaatatgagaatttagacggagcgactgatgttcaaactgcttttggacttaacataatgaaaaagagtggtataaaattaaaacaagtgagaatattgctagaagatagttcggtaacacttgaaccaggttctttgagctatatgaaagggaagattcaaataacaaataaatcaggtgggttgttgggacttggcaaaaagataatatcaagtaaattaataggagaaagtatatttaggcctacttatagtgggactggagaaatatttttagagccttcttttggtcattttgcattaatagagctagaggatgatgaaatagttgtgggagataatatgttttatgcatgtgaagaaggtatagaaattgatgcaacaatgcaaaaaaatgtatcgtcagcttttctagggaatgagggactgtatcaaactaggatagaaggtagcggaatagttgttcttaaggttccagttccagaaagtgaaatatttaaatgtatattaattaacgatactttaaaggtagatggaaactttgctatcttaaggacaggaaacattgaattctcagtggagaaatcatctaaatcaattataggaactgcagttagtggagaaggtatggtcaatgtatatagaggtactggagaagtttggctagtacctacaaaaagtatatacaaggatttaaatattaagggattggacgcgataagtggcataaatccagaaagtaatgttgaagatctataattagaatattataaatttaattaaagaagaagtgtattataaattttattttataataagcttcttctttgttttatgaattttatgtaattcatattaatatatgctttcgtatattaaagttgtaaagtaagctttagatggttataattaaagagaaaataagtattacaagaggtgataaagtgggttctttagagtcaaagctaaaaagtaaagaattagatttattttttaaatcaattttagaacttaaaaatatcgatgaatgttataaattctttgaagatgtagcgacaataaatgaagttaaatcattagcacaaagattacatgtagcaaagctgcttaaatgtaaaaagacttattcagaaatagctgaaataactggagctagcactgcaacaattagtagagttaatagatgtttgaattatggcagtgatggatataatttagttttagaaagattaaaagatgaaaatatagactaaatagatgctgattctaaaaatattattcttatgtgtaattgattgtaaaatagtaatattataacagaaagagaagattgtaaatacgtgttaaaaatattatactatttaaggtaggcactgaagaaattgcaaataatattatccattgtaagtgattaagtatattatagtaattgagtgactataacagaataaaaaagtgaggtaaaattatgggtagaatgtttggaactgatggagttagaggagttgcaaatacagaattaacagcaagaattgcgtatgatcttggaagagcaggagcatatgtattaacagaaggagctcataagcctaaaatattagtggcaaaagatacaagaatatcaggagatatgttagaatcagcattaatagcaggaatattatcagttggagctgaagcaatagtgcttggagtagtacctacaccagctgttgcatacttaacaaggaaatatggagcagatgcgggtgttatgatttctgcatcacataatccagtagaatataatgggattaagttctttaacgataaaggatacaagctttcggatgaattggaagatgagattcaaagagtcattgaaagtgattttgaaggagttccaagtccaacaggcacagatttgggcagagagacaattgaagtgtcagcattagatgattatatagaatttgctaaaaacactataccttatagcttgaagggattaaagatagcattagattgtgccaatggagctgcatataaatcatcagtaaaagcgtttagagaactaggcgctgatgtatttgtaattaatgacaatccagacggaacaaacataaatgaaaattgtggatctacgcatccagaagaattaatggaatatgtaattaaaaagaaatgcgatttaggttttgcctttgatggagatgcagatagatgtttagctgttgatgaaaaaggtaatttaataaatggtgattttatactaatgttatgtgcaaaatatttaaaggaacttggtaagttaaaagatgatacattagttgtaactgtaatgagcaatcttggattagatattgcatgcaaaaatgaaaaaataaacattgttaagactgctgttggagatagatatgttttagaagaaatggttaaaaacaaatatgtcttaggtggagaacaatcaggtcatgttatattcttagattataattcgactggagatggattagtaacagcgcttcaaattgcagggatagttaagaaaaaggaaaaagcattatctgaattatgttcaataatgaaggaattaccacaagttttagctaatgcaacaataccaaacgataaaaaagatttatatttgacagatgatgaaatacaaaacgaaataagaaaaatagaagaagctttaaatggtgttggaagagtacttataagaccatctggaactgaaccgctagtaagagtaatgcttgaaggagaaaatcaagctgagatagatgaaatggctcataatttagcaaacttaatcgagaagaaatataattaattaaataaagtatatataattttgttaagaggaactctattaaatgagttccttttttatttatttacccaaaatagataaaactaatttaaaattgctataagtttataaagttgcttgaaagtttgtctttttacatataattttttatgaataacaaatgaacaataaggggataaatagattaatacataaaataataatacgttgataaaggaggcatttatatggacaaagaaccttataatgaatatctagtagtgatgccaaccggtaattgcaagggatttaatgatatagaaggagtaaaagcatatattaatatgtattatgaattgcgtcttgatgatgtttttcataaggatggttataatgatgctactgaaataggtggagatgaatataggtacaacgtatttacacagttaggtgccgaagagggagcgaaatgcgaaatatataaaacagcgtcattcattgaagaaattaataaagagttagtttttgaagatgagaaggaagagataatttcaaagttatgtgaagcaaaaataaattttaacatatatgattatagtttagatacagttttagcaaacattcaagaagttgaatatatggatgattatggaacaaatgttagcaggatgtagtactccaaattaaaaaaacaataaaagtgagcttatttaaattgttaatttaagctactataaagattaatataattaaattaagtcttagtgtattgatatatagttaaaaaagtgcataaaaaaatgataaatagttaattttcatatattgtaaatatataaaaaaatgataatgaaaaatatataattaaaatgttgacaacaataaaaaccgagagtacaatttagtctaacaggaaaatcaaataggtccttaagctataaaatgctgagatggagaaaattatttagtagataagttgcagagagtcgatggctggtgagaatcgatactttagctctataattatcactcctgagcagaatccagaaagaggaacaacgtttcttgagtaaaagatatccggtgtgcatccgttatatgcaagggtttgttagaacctagtgatattatgtaaggcggaatattatcccacttcttatgatttatatcattaagggtggatttttttaaccatttttaaggggggaaggcaatggagaagcatgtattatctgtcttagtaaagaattcatctggtgttttgagtagagtcagtggattgttttcaagaagaggatacaatatcgatagtttaactgttggtagaactgaagatccttcaatttcgagaatgacaattacacttatgggagacgagaatgtattagaacaggttaagaagcagctaaataaattagaagatgttataagggttataaactttaaagctgatgactctgtttatagggaattggtgctaattaaggtaaaggcaagtgcagaaaacagagccgcaataaatgaaactgtaaatatttttagaagcaagataattgacctgtctacagacactttaacgatagaattaactggggatgaaaataaaatatcagcattaataaacctgatggaggagtatggaatagaagaattggttagaacaggtgtgacagcactacaaagaggggaaaaaactataagaaattccattgaatcttattaatgtacattaaataaagataatctaaaagcaataaggcaataaaatgaaaagggggataatcatatatggctcagaatcaggtgaaaatatttgattctactctaagagatggagcccaaggtcaaggaatttcattttcattagaagataaaattaaaatagtaaaagttttggatgagatgaaagttgattacattgaagctggtaatccaggatcaaatccaaaagatatggaattctttaaaaggcttaaggatgtggaacttaagaacgcaaaggtcgtagcatttggatctacacgaagacctaaaattaacgtagaagatgataaaaatctaaaagacttactgtcatcaggggcagacacaattgtggtattcgggaagtcatgggactttcaagtaacagatattataaaaacttctttaagtgaaaatgtaaatatgataaaagacacaattgagtatttgtgtgttaaggggaaagaagtaatatttgatgcagaacatttttatgatggatataaagccaacaaagagtatgcgatggcaactttaaaggcagcagaagaagcaggggcaaaagtagttgtactatgtgacactaacggaggggctttacctcaagagatatatagcataactaaaaccataaaagaaacagtgaaggttgagcttggaattcatagtcatgacgatatggggatggcagttgcaaattcgatcatggcagtggaggcaggagcgagtcagattcaaggaacttttattggaataggagaaagatgcgggaatgctaatttaagcacaataatacctacattaaaactaaagcttggatataaagttttaaatgataacgagctagtaaatctaacaaaaacatctaggtatattgctgaaatttgtaatatcactttatcagatgaagatccatttgtaggaaattcagcgtttgctcataaaggcggaatgcatatagatgcagtaactaaatcaccaaagtcatatgaacatatagagccagaattggtagggaataagaggcgctttttagtatctgaggtaagtggcaaaagtacaattttacaggaaatacaaaagatatttcctaatatatctaaggatgataaatcagttcaaaagattacagatagattgaaagaactagaatatgatgggtatcagtttgaaggagcagaaggaacagttgaattagttataagaaaaattattggaaagtacaaaccgttctttaaattgaatcattttaagatcattggtgaacaaccctatggatcagaggagttctcatcaacagcagtaataaacattacagttgatggacaaaatgagatgacagcagcagaaggcgaaggaccagtgaatgctttagataaggctattaggaaagcactagaagttttttatccagaattaaaacaggcaagattagtggattataaagttagagttttggattcagaaagtgcaactgaggcaaaggtaagagtattaattgaatcaacagatgggattgaaagttggagtactgttggggtatctcgggatgtaattcaagctagttggatagctctagtagattcaatagaatataaattaataaaagatattgaaagaaaagtaaaagcatatttttaagggggattaaaacatgggaatgacaatgactcaaaaaatcttagcagctcatgcgggattggaagctgtaaaagctggacaattaattgaagcaaatcttgatttagtattaggaaatgatattacaacgccagttgctgtaaatgaatttaagaagtttggaacagataaagtatttagcaaaagccaaattgctatagtaccagatcactttacccctaacaaagacataaaggcagcagaacaagttaaatatattagagaatttgctcaaaatatggagatagaaaatttctttgaagtaggagaaatgggaattgaacattgcttacttcctgaaaaaggtctagtagttgctggagatgttgttataggagctgattcacacacatgtacttatggagcacttggggctttttcaacaggaataggatcaactgatatggcagctggtatggctacaggaaagtgttggtttaaggttccatctgctttaaaattcgtacttaagaataaaccagcaaaatggataagtggcaaggatataatcttacacataatcggaatgattggtgttgacggtgctctatataaatcaatggaatttgtaggtgatggcttacaatatctttcaatggatgatagatttacaatggcaaatatggcaatagaggctggtggaaagaatggaattttcccagttgatgataaaacagaagaatatttaaaagatcatgcttctagagaatggaaggtttatgaagctgacgaagatgcagaatatgataaagtatttgaaattgatttaagtgaattaagaccaacagtttcatttcctcacttaccagacaatacaagaacaattgataatactggggatgtagctattgatcaggttgtaattggatcatgcacaaatggtaggatttcagatttaagaatggctagagatatcttaaaaggaaagaaagttaaaaagggcatcagatgtatagttatccctggaactcaaaaaatttatttacaagcaataaaagaaggaatagttactgacttggtagaggctggagctgcattttcaacaccgacttgtggaccatgtttaggtggacatatgggaatcttagctaaaggtgaaagatgtgtatcgacaacaaatagaaattttgtaggaagaatggggcatgttgagtcagaagtatatctagcaagtccagcagtggcagcagcgtctgctttaaccggaaaaataactgatcctgaattagtgtaggaggtatttagtaatgagtgtaaaaggtaaagtattcaaatatggtgataatgtagatacagacgtaataattccagcaagatatttaaacacttcggatgctaacgaacttgctgcacattgtatggaagatatagatgtggatttcgttaaaaatgtaaagagtggagatataattgttgcaaataagaattttggatgtggttcttcaagagaacatgcacctttagcgattaaaacagcaggggttagctgcgttattgcatcaactttcgcaagaatattttatagaaatgcaatcaatattgggttaccaattttagaatgtgatgaagctgtaaaaaatattgatgcaggagatgaattagaagttgatttctcaacaggtcttattaaaaatttaactaagagccaagagtatcaaggggaagcattccctgaatttatgcaaaaaatcatcgataatgatggattgattggatatataagaaatagatagaaaaactgattattaaaagaagaatcaaattaaactaatatattttcttaagagaaggatactaataactagaattaataattaaattttgattaaaaagcaataagaaataggcaattataagagggggattatcataatgaaatgtaatatagctgtaataccaggggatggaattggcccagaagtgatagatgaaacaataaaggttttaaaagttattggagataaatttgggcatagatttgaatatgaatatgtattagcaggtggatgcgctattgataaagaaggaactccgcttccagaagcaactttagaagcatgtaaaaaaagtgatgcagttctactcggagctgttggaggccctaagtgggatgatcctactgctaaaataagaccagagcaagcgctactaggattaaggggtgcattaaatctttattgtaatttaagaccagcagtactatatgctccactaaaaaatgaatcaccacttaaagatagcattgttaaagatgggatagatatctgcatagttagagaattaacaggtggaatttactttggagaaagaggattggaagaagtagatggagtaaagagtgcttatgacactgaaagatataatgtaaatgaaataactagaattgctaaaataggatttgaaacagcaatgaaaagaaataagaaacttacaagtgtagataaagctaacatattagaaagttctagactttggagaagtgtagttaacgagatggctaaggattatccagaagttgaagtaaatcatttgtatgttgataatactgctatgcagttagtaaaagatccaaatcaatttgatgtaattgtaacttcaaatatatttggagatatattatcagatgaagcaagtatggttacaggttcaataggtatgttaccttcagcatcgcttggggaaggaactcttggaatgtatgaaccaattcatggaagtgctcctgatatcgcaggacaaggaattgctaatccgttagcaactattctttcagcagcaatgatgcttaggtatagtttttcattggaggaagaagcaaaatctattgaaaatgcagttttagcagttcttgaagatggatatagaactggagatataatgactgaaggtaagaagaaagttggaacaattgaaatgggaaatctagttcgcgagaaattagaggcaacaaaatagaatctaaatcaatttatacattgctagttatcaaacagagatcattttataagcaaaggagtgaataaaatgttattgacgggggctgaaatattaataaagtcattgcttgatgaaggggtagagactatatttggatatccaggtggggcggtattaaatatatatgatgagttatacaaatataaggataaaattcgtcatgttcttacttgtcatgagcagggagcatcacatgcggctgatggatatgcaagggccactggaaaagttggagtttgtcttgcaacttcaggacctggagctaccaacttagtaacaggtattgctactgcatatatggattcaattccaatggttgctattacgggaaatgtggcaaagccattacttggaaaggatagttttcaagaggttgatataactggaattacaatgcctataacaaaacataattatattgtaagggatattaatgaacttcaggacgtaataagggaagccttttatatagctcaggaaggtagaccgggtccggtattgatagatattccaaaagatattactgctgaaaaaactcaatataataaaataattcctaaagaggtaattagaaaatcagagcatattacagaaaaatcattacaggaagctgttgggttaataaatcaaagcaagagacctcttatatatgcaggcggaggtataggtatatctggagcaacatctgaattaataaaatttgcggaaaagataaattgtcctgtatcaacatcgcttatgtgtatgtctgagtttccaaatgatcatgaattatacactggtatgataggaatgcatggaacaaaagcatcaaatattgctgcaactaaatgtgatttattaataactctgggagctagatttagtgatagagttataagtaatcaaaatcatataaaaaatgcaaagatattacaaatagatgttgatccagcagaaataaataaaaatataaaagtcgatacatgtatagtaggagatttaaaggtggcactgaatcaattaataccaataattgatgaaaagaaaaatgacgaatggttggatactataaataatttaaaagagaataataaattagtgccatactgtgacttgactccggaattgttctttgataggttgaataaattaaatgacggaagttttataatttctactgaagttgggcaacatcaaatgtggactgctcaatatttcaattttaaaagtgaaagaacatttataacatcaggtggacttggaactatgggatatggtcttggagcagcaattggagctcagataggcagatttgataaaagagtatttaatattgcaggagatggaagttttggaatgaactgcaatgaattagttactgctgttaaaaacaatcttccattaattcaagttattatgaataacaattgtttaggaatggtaaggcaatggcaagactttttctacgaaggaagatattctgagacaactttagatagacctacagattatgttaagcttgctgaagcttttggagctaaagcatttagaataactcaagtagatgaaatagacgatatacttagaaaagctctggattcagaaggtccagttcttatagattatctaataaacagtgataaaaaagtttttcctatggttgcacctggtgcgccaattaaccaaataataagtgaagaagatattaatattaactaggaggtcattaaaatgccaaaaatgtattacgaaaaagacacagatttaaatttattaagaggaaagaaagttgctataataggatatggtagccaagggcatgcacatgcgttaaatcttcatgaaagtggagtagatgttgttgttggattgtataacggaagtaaatcttgggctaaagcagaagcagcaggattgcaagttgcaactgttgcagatgcggcaaaagcagcagatttaatcatgattttattaccagatgaaaagcaagcaaaaatatataatgaagaaattgctccaaacttagaagaaggaaatgcattagtttttgctcatggatttaatatacacttcggtcaagtggttccaccttcatacgttgatgtatttatggttgcgcctaaaggtccagggcatttagtaagaagaacatatactgaaggtgctggagtaccttgtttaatagctgtacatcaggatgcaacaggaaaagctaaacaatatgcattagcatatgctaatggaattggaggagcaagagcaggagttcttgaaactacatttaaagatgaaacagaaacagatttattcggagaacaagcagttctttgtggcggagtttcagaacttatcaaagctggctttgaaactttagtagaagcaggttatgctccagaaaatgcttactttgaatgtatgcatgaaatgaaattaattgttgatttattatatcaaggtggattaagcatgatgagatattcaatttcagatactgctgaatatggagattaccaaattggtagaagaatcatcacagatgaaactaagaaagaaatgaagaaagttcttactgaaattcaagatggtacatttgctaagaattggttgttagaaaaccaaactaatagaccaggatttaatgcaagaagaagaatggaagcagaacatccaattgaaaaagttggtaaggaattaagaggaatgatgagctggattgatacggctaaagtagactaatatttaattatatgtattagggtagcagattttgaatctgctactttctttttttatgaatttatagtttagcagaatctgtgcataactattgaaagtaatagaaatgcaggggccacgaattagaacatgttattaattcagaaatattttatatgagaaaagtaatttaagtggtattatgatcaactaaatgtttaaaaagtatatacaataaacttatatgctatagaattaataaaaatgagaatatattacatccaaaaatgaagtaaaaatgatatacaagaaaagtaaaatagtgtaccatatcagtataaaaaatcgcgtagtttacaatgttttcggttacgcgattttttgtatttttaggaaattgaattataaagggggagaatagaaaaaatgacatttctatttggcacaaattgtaccgtggcatagatattgctactataagatattatggaataaaaagtatgaaaataaacacatcataatcactaaggtgcaaaataattatagtatatcgtggagggattacatgcaaagattaatagaacttattaatagtgaggataaaaagaatccttataccgatcaagaacttgcagaattcttatctataccaaggctaaaagtaatacaaaaaagaaatgaactaaatattccagattctagggatagaagaaaagaactgctattagcagatctaagagaaatattgaaaaaaaatataaatttatcggaacgaaaagtaacagaactaatgatggagagaggctataatatttcacgtagtattataagtaaaaatattaaagacgttattcaagagatcaaagggggaaatgagtctacacttccaaatgaaactctagtgattaaagaaaaagataataataaaaatgaggaaagctttcaaaaacttataggatatagagggagtcttagaaataagatagacctagcaaaagcggctatattatatccaccgaatggacttcacaccttaatttatgggggctctggagttgggaaaagtgagttggcggaatgtatgtatgagttttctgtattaagtggagtaaagtctaaagatgcccctttcatagtatttaattgcgcagactatgcagaaaatccaaatttgctcatagcccagttgtttggagtaattaaaggcgcatatactggggctaattcagataaagaaggattagttgaaaaagcaaatgggggaattttatttttagatgaaattcatagacttccatcggaagggcaagagatattgttttatcttatagataaaggaaagtatagaaggttaggtgaaactaatgttgaacgaaaagtaaacgttcttatactggcggcgactacagaaaacccagaatctaatctactattgacttttagaagaaggatacctgtacttattgaattacctaaattaacggaaagaccgttatctgaaagattagaggtcatagtaatgtttttaacaagagaggccagaagaattaatagaaatctattggttaaaaaggatgtattaacgtgcttgatgatgtataactgtaaagctaatataggtcaattaaagagcgatattcaagttatatgtgcgaagagttatgtaaaatatatgtttaagaatacagatgaagttgttatagatatagaagatttgagtctttcaatcaagagtgcactttcagaaggccagaaagagaagaagcaagttaaaaatcttggaatagatgacttatatatagatataaagaatgaacaaaaaaataaagatgaaatatacaaatatgtaaacgaaaacgagatatatcactatatagaggaacaatttaagaagcttgaattagaaggaataaaaaatgaagagatggatgaaattcttttagaaaaagttgagaataagttaggtaaaattattgataataaaaagataactaaacttttaaatattaatgagttaaaaacaatagtaagaccagaagttataaacataacagaaggaattcttgaattagtgagggaaaaatacaaatttataaataatagtttttttattgccttagcaatccatattaattttacaattgaaagagtaatgaatggaaaagttataacaaaatcaaatattcatatggaaaaggcaaccatggtacaagaaatgaaaattgcagagaaaatcagaataatgatagaaaaatccacaaagttaaaaattccgaaggaagaaacaacgtatatagcaatttatataaagaaattctgttcagatgtgtttaatgtaaaaccaaaggttagagtaatcataataactcatggacatgtagcctgtggaattgcagacattgttaatcaattgttgggggtggaagatacagttgggatagaaatagctttagatgaatctccagaaagcggtatagaaagaactattgagttagttcaggaaatagacgaaggacggggatgtttactacttgtagatatggggtcattgggaatgttctcaacaatagtggaagagaggactggaatcaaaactatgagtctagctagagttgacacgttattggcattagaagctgttagaaaagcctctatagagggagcaagcttggaagatatagttgaaatgctaaaggaagttaaagaatataatggtacgtttaagtcagaaatagcaggtaaaaagaataagaaaaaagcaataataactgtttgtttgactggggaaggaaactcgctaagtataaagaaataccttgaaagtcatctgaaaacagctaaccatagtatagaaatttttgcaatggggcttattcgtgaaaaagatgtggaggctgaaattactaagatgtcaagtgaatacgatattgtggcagtatgcggaacaataaaagtaaatattgcaaacataccatttatagattatgacagtatattaaatggaagtggaattaatagattaatcaagcttatggagatacagtttgataataaggaaatgttagtttatgagaggctaaacaagctaatatatgaagaatttattttattaaacttagactgtgtatttaaagaagaagttatagataaaatggcagagttacttgaagaaaagggatttgtaaataataagtttatgttaaatctatataaaagagaagcaatgggaaatagtgtgtttaataaagaggtagctattccccatggacttcctgaaaatataattagaccagctatagttatagcaaaactaaataaaccaatccaatgggataacgaaacagcggtagatatagtttttatgttggcacttaaagaagacaatagagaagagataaaaaaattgttttatatggttagagaaaaaaacttagtaaacaacgtgcgtatagctcaatctgaaaaagaggtaaagaaattgttttcataaaatcaaaatattccaaaagtttggcatgagtcttgcgatataaatagccataaaggttaagtaaaaaatagtgtagtgaaaggagaagtaataatggaactagttaagtttattaatgaaaaattaataaaagtaaatttaccatgcaaagacagaaatgaattgttcaaggtgatgcatgatgaagcctttaaatatggatatgtagaatcaagttttttagatggcttaatatcaagggaaagcatttttccaacaggaataaaactaaataattatagtgttgcaatacctcatactgatgcagttcatgtcaaaaaggaatttattgcaatagttgtaccagaaaatccaatacaatttaaactaatggaagatgagaaacaggaggaaaaagtaaatttagtatttatgttaggactgaacaaacctcatagtcaattagaagtgttaagagagctaatggatcttatacaaagagaggatctagtaaaacaaattataagagcaactagtcaagaagacattgaaaatattttgaataaattacaaagtgtataaagggaggaattaattatgaaaaaacgtattttagtggcatgtggggctggaatagcaacatcaacagtggtttgtgacagagtggaaagattagtaaaggaaaataatattgatgcaactgtaactcaatgcaaaatagcagaagttgggtcattagaagatcatgcggatttaataatttcaacaactattttgccaagagaatttaaaattccagctataaaggctacagcttatattagtggaataggtactgataagttagatgaaaaaatattaagctatttaagataacaaagctataaattacctttttaatgatgttaagaaggtaatttaaataaataaaataaagggaggaaaaatgtcatgaataatttaatgggagttatacaatatgtcctaggtcttggaccaactgtaattttaccaattgctattctgataataggattagtttttggtataggattgaagaaagcattaaaagctggttttacaattggaattgggtttgttggcataaatttagtaattaatttacttactggaagtctagggccagcagcacaacaaatggttgaaagatttggattaaaattaacagtactagatacgggatggccgtctgcagctgcaggggcttgggcttccccagtagcagcaattttaatacctataatcatgggcgttaatatattaatgatattaactaaaacaacaaagactttgaatatagacatttggaattattggcactttatagcagctggagcaacagggtatatattaactaacaattggtttttcgcaatcttctgtgcagttctcttagaagtagtaactttatttatagcagataaaactgccccaatgataggaagtttttatgacttagaaggtgtatcactacctacagcctcaacagcatctttcgcacctttaggatttttagtgggttacttagttgaaaaaattccgggattaaacaaaataaaagctgatcctgacactattcaaaagaaatttggtatatttggtgaacctatgatgatgggaatagttataggttgggtactaggaattttagcaggatatgacattggtaagacatttaatatgggaataacaatgggagcagttatgattctaatgccaagaatggttaagataataatggaaggtctaataccagtttcagaagcagcaagagagtttttacaaaagaaatacggagatagagaactttatattggattagatgctgcagttgcagttgggcatccagcagttatatcaacagcactaattttagtaccaattacaatctttttagctgtaatattgccaggaaataaagtattaccatttgctgatttagcaacaattcctttctgtgtagcatttatagtaggatcaagaaaaggaaatatcgtgcactcagttataacaggaacaatagtaatggccatttcattatatatggctacagattttgcaccagtatttacacaaatgttggcttcagctcaatttaagatgccagaaggtgtggcattagtatctaacatagatacaggtggtaatttgcttaactggttagtactaaaattatcacaattagttcaacctttatttggataacaacgaagtaataaaaaatttaatagaataaataattgtagatttatttaaagcaggaggttagcaataatgaaagcattaacaaaaacaaatccaggatatgatcaaatggaactattagatatgcaggagccaaaagctactaaaaactttgtgaaaataaaagtagagtatagtggaatatgcggatcagatttacattcatttaaaggtgaatatggaaatataaagacacctgtagttttgggacatgagttttcgggaacagtagttgaagtaggggaagaagttaaggaaattaaaataggagatagagtaacaagtgagactacatttgaaacttgtggaacatgtgattactgtaagagtaaagattataatttatgtccttcaagaaagggtattggaactcaagtaaatggtagttttgcagaatatgtgctatcacgagaagaaagtgtacatgtattacctgataatgttagttttttggcagcctcattaactgaaccacttgcatgttgtgtacatgctgctttagagaaaacgactatagataaagatgatgtagttttaatattaggaccaggaccaataggattacttctagctcaagtagttaagtcacaaggtgctaaagtaattttaagtggagttacaaaggacaaagaaagattagagtttggtaaaaaattaggtgttgatgtgattgttgattcattacaagaagatttagaaaaaatagtaatggaaaagactaatggatatggtgttaatagagcgtttgattgctctggagcagttccagctgtaaatcagggactaagacttataaagaaaaaaggtgaatttgttcaagtaggattatttgcaaatattaaaaatccattagaccaagaagctattattcaaagagagattaaatacgttggatctagatcacaaaaaccaagttcttggataaaatcactagagttaatggaagcaaaaaaagttgacccagaagcattgataacaaaaattgtagatcttaaggattggagatctggaatagaggcagctatggaaggtacagaattaaaagtagtaataagatcttaattacttagaaggaagtgttatttgtgaacgaaaatttaaaaaagatagcgaacaatataagaataagcattattaaaagtgtatcagcagcaaaatcggggcatccaggtggttccttatcaattacagatattcttactgtattatattttgaaaagatgaatatagatcctcaaaatcctaagaatccaaatagagatagatttgtattatcaaagggacattcagcaccagcgctatatgctactttagcagaaagaggatatttttctaaggaagaacttttaggattaagaaagtacgaatctaaattacaaggacatccagacatgaaaaaaataataggtgttgatatgtctacaggttcactaggacaagggctctcaacagcaaatggaatggctttagcaggaaagttagatgaaagttcttacagagtttatgcaatacttggagatggggaagtacaagaaggtcaaatatgggaagcggcaatgagttcagctcactataagcttgataatttaactacttttcttgatcttaatggattgcaaatagatggctctaatgatgaagtaatgagtataggtcatgttgacgaaaagtttagatcatttggatggaatgttttaactataaatgggcattgttttgaagaaatagttaaggcaatagatgaagcagcagctacaaaaggtaagccaacaatgatagtttgtaatacggtaaaaggaaaaggcgtttcatttatggaaaataacgttgcatggcacggatcagcgccaaatgaagaacaaactatgaaagcgttagctgaattagaaggaggcgtaagataatgggaatagcaacaagagaagcttatggaaaagctctaaagaaattatcagaagacagaaatgttgtagtattagaagctgatttaggaaaggcaactaaaagtatagaatttaaaaaacatgcaccagaaagatatttcgatatgggaatagctgaaggggatatgattggaactgcagcaggccttgctacatgtggaaaaataccatttgcaagtacatttgctatgtttgcagcaggaagggcatttgagcaaataagaaactcagtggcatatccaaatttaaatgttaagatagtagcaactcatgcaggaataacagttggtgaagatggaggaagtcatcaagctattgaagatatttctttaatgagaagtatacctaatatggttgtattgaatccagcagatgctattgaggcagaaaaagcaatatttgctgcgaaggaatactatggaccagtatatataagattaggaagatcagcaactccagatatacacagtgaagactatgagttcaaaattggaaaaggagaagtcttattaaacggtgaagatatagctgtagttgcaacaggattgatggtagcaaaggcattagaagcagctaaaaagttgagtgagcaaggaataaacgcaacagttgtaaatatatcaactataaaaccttttgataatgaattaattgttgatattgcgaaaagaataggaaagattgtaactgtagaagaacatagcataataggtggattgggttcaacagtcgcagagttattgattgaagaacatccagtaaagattaaaagaattggaataaatgacgaatttggaagatcaggaaatgctgaagttttattagaaaaatataatttaacagcagcacatatagttgaaacagttaagtcattattataagtcaaaataaagtaataaatgaagtaagaatgggggattgtagatggaaacaataatttcgccatcactattatcagcaaatgtatgtaattattcagatgattttaaagtattcaacgaaaaaaatattcaagtcatccatattgacattatggatgggcattatgttcctaatatatccataggattagatcaagtggcttctttaagaaagttaaccgatgctgagtttgatgttcatttaatggtcacaaatccagatgaatttgttgaagctttagtggaagcaggcgcgaatagtattactatacattcagaagttgcaactcacttgtataaaagtatacattatctaaaaagttttgggataaaagcgggagtagctttaaatccagccacaccaataagttgtttagaacacgtttattctcttctagatagagttttagtaatgtctgtagaaccaggatttgggggacaaacgttcattccgtttagtttggagaagataaggaaacttaatgatattaaaagcgagaacaattatggatttactgttcaggtagatggaggaataaatttagataatatagaagatgtgattaagtcaggagctagagatattgttataggttcatcattatttagagaaaacttatcagacaatattgattcatttaatcaaaaaataataggcatcaacaataccccataactcattaagaataattaaaatatcaggagaatattgcgagtattctcctgttaatttaacatcaattatactactagtcagcataagtttcaattaataaatatagaaagaagatgaagcgaatgaaaattgcattaggttgcgatcatggtggcattaatttaaaaggagctataaaaaagcatcttatatctaaaaatatagaggttgaggattttggaactaatagcagtgaaagtgtaaattatcctgaatatgcaattaaggtttctaaagcagtgatatctaaagaatgcgatttgggaatattatgttgtgggacaggaattggaatgtcaattgcagctaataaacataaaggaataagagcagccgtcgttggagattgcttctcagctaaaatgacaagagagcataataatacaaatgttttatgtttaggtgaaagagtaacaggagaaggattagcacttacaattgtagacacttggataaattcaaaatttcaaggtggacgtcattcagaaagacttgctttagtggaagaaattgaaaataagtaagtaacattcaatagtgaaaaagtatttattagtgtttattaaatatattagatttattgcagtaggtgtcttatcatgaatttttgttttagaggggagttattattatgctacaagaacttaaaaaactgcaaagtggaactgatataaggggaatagctatagaatatgaaggagctaaaaatcttacacctaatttagtgaataatgtgggatttggttttgtagagtggcttaaaaaaactaaaggactcagtaataaaaatataaaaatagcagttggcatggattcaaggttatctggaccagaattgaaaaaatcattaatagaagctttagttgattctggttgcaatgtttatgattgtggaatatgtacgactcctgcaatgtttatgacaactatattagagaattattcatgcgatggagctgtaatgataacagcaagtcatcttccgtattactataatggattgaagttttttactaaagaaggtggatgcgaaaaagaagatattgaaaacataattgaatgttctaacttagcagaaaagaaatgtactactaaagggctagttgaaacaatctatttcatagatgtttattcaaatatattagttgataagatacgaaagaatgtaaattcaaaaacaaattatgagagacctttagagggaaccaaaataattgtagatgcaggaaacggagcaggtggtttttttgcatataaagttctagagaaattaggtgcgagtgttgagggaagtcaatttacagaaccagatggaaattttcctaaccatattcctaatccagaaaatgaagaagctatgaattctataaaagaagcagtacttaataataaagctgatttaggaataatttttgatacagatgtagacagagcggctatagttagtagtgatggaaaagaaataaataaaaatgcacttatagcattgatatcttcaatagtgctagaggaaaatccaaattcaattatcgttacagattcagtaacctctactggactttcagattttataactagtttaggtggtatccatcatagatttaaaagaggatataagaatgtaataaatgaatctaaaaggttaaataaagaaggaaagttaagctgcttagcaatagaaacatcaggacacgcagctttaaaagaaaattactttttagatgatggggcatatttaatagccaaaatactaattaagatggccaagttaaaagatgaaggaaaagaaatatcaagccttatagaaaatttaaaatatcctaaggaaagtatggatatgagaataaacataaagagggaagattttaaatcatatggagaaatgataatagaaggcttgaagaaatatgtagatcatgtgaatggatggactattgaacctaaaaattatgaaggaataaagataaattgcgataaagaaaatggagatggctggctattgttaagattatcgctgcatgagcctgtactgccactaaatatagaatcggattcggaaaactctattaacataatattagaaagattaatgccatttttaagaaaatatgaagatttgaatttagataactttagcaatgtattttttgggaacaattaaaaaaatagaagattataaatctaagataaatgagataaaagaaatttagcatatgttttaagtataaaccgattttaaataatattatattgtgtgaaactattaaattgttaataatcataggacaatgaaaatataaattgtcttatgattatttgcattataaaatatatatagattaatataagttttttggaattggagagcgaaatgaattatgtgtatattgtagaatgttcagatagaacactttatacaggatggacaaataacttaagaaaaagaatccaaatgcattcggatggatgtggagcaaagtatacaaggggaagagggccagttaaattagtatattatgaggtgtttgaaaatagaaaagatgcaatgaaaagagaatatgaaataaaaaagttaacaagaaaagataagttagcattaataggtacgtataaagccgaaaataggtataaataaatgagaagaatctatgcaaccgtttttataaagaggtctataattgagtaaatggtaataaaacacggaaaagtcattaaatttaatcaaaaataaaggaaaatattatttgtaaaagttttctttagttgatatacttatatcattaagaagtagatctacttaagaaaaggttaacaaacagggtctggatagcttggaatgctaaaaagactacatttttttaaaattttcgcaatcgtttgcgaaagaaagtgattaacatacatgcttaaataaatttttgggtatgtgttatataaatatatgtttggtattcttgaaaatcatttagaatgttaaacaaaattttaatggaggggtatttaaatgaaaacaaaacaaatattatcaacaattttagcttctacattattggctggtactatggttggatgcggaagctcatcaggagcaagttcgcaaagttcaagcgatgctggaagtggaaaaacaattaaagtatatcaattaaaggttgaaattaatgatgcacttcaagaacttgctaagaaatatgaaaaggaaaaaggcgtaaaagtcgaagttacttcagttggcggtggagctgattatggagcatcgttaaaggcagaatttcaaaagggtacggaaccagatatatttatgattcaaggagctggggattatgaaacttggaaacataaaattgatgatttaagcgatcaaggctgggttaaaaatgctgttaaaggaacgctagatacagtaactatcgacggaaaagtatatggaatgccagcagcaacagaagggtatggcttgttatataataaagatattttggacaaggctggtatcaatcccaaatctttagattcttttgataaattgaaagcagcgtttgagacattagatagtaaaaaagctgaattaggacttgataatgttgtttcttatacaacaaaagaattctgggttactggtaatcatacatttaatataccacttgcaactcaagataatccggctcaatttacaaaggactatcttgcaggcaaagcagatatagttaataataagcaatttaatgactggatgaacttagttgaattactttgtaaatatggtggaggaaagaatctagacactatagattatagtactcaagttggtaactttgcacttggaaagactgcattcttacatcaaggtaactgggttgctggggatttacaaaagctagaagatccaaataagaagttccatatgggatttgcaccacttgcaattaataatgatccaaaaatgagtggatctattccagtaggtgttccaatgtattgggtagtaaataaagattctaaaattaataaagaagctaaagaattcttagattggatggttacaagtcaaacaggtcaagaggcattagttaaggatatgaatatgattccagcatttacaaactttacagttgaaagtgataatgaattaaataaatcaatttctgaatataacaaagaaggaaagactcttccttgggcattcactaatctaccagatggatttaacaagaatagcttagcgcctttattctctaaatttattaatacagatatggggccacaagcgaagaaagatatgttacaaggaattcaagatgctacaaaagctaaataatattagataagatttattcatgaggggattaatacctcctcatgaattttgtataagtattttaaattataagatagagctaactattattaagaaaggagtaagtgtatgagtaagaaatcacgagatattaaagatttttggatttttgttggaccagctttatttgctatgacaatggttgtaataattccgtttataataggtatatattatacatttacaaattggaatggtgctaatcctcattatgattttgttggaataaaaaattatacaggaatctttaaagatgtacaatttatatattctctaaagataacagtgttatatacaattgtgagtgtaataactataaatataatagggtttggactagcgtatatagtaactagaaaattaaaaactagtagtttcttaagaaccggattctttatgccaaacttaataggaggattaattttaggttttatatggcaatttatgtttaattcagtatttacaggagttggtaaagcattgggaagtgcaacactttcaacatcacttttgcaagctccaactacggcaatgctagcaatgctaatcgtttcgacatggcaatatgctggatatataatggttatttatgtggcagcccttgaaaatgttccgactgacttaatagaagcagcgcatattgatggagctaatggatggcatacatttaaaaatataacaatacctatggttagacaagcggtcacaatttgtttattcttaactttagcaaattcatttaagttatttgatttaaatttttcacttacaccaatgaaaaccactgaaatgttagcattaaatatttacaatgaagcgtttattgtgaacaatatgggaataggacaagcaaaagctattatattctttgtactagtaactactatttctttaactcaagtttactttaataagaaaaaggaggtagaggtataatggagccaagtaaagttgttaataatatagaaaaagttaaagcaaataaaaagctaaagacactagatagttatactggcagattaaaactattagaagtattttcatggttactattgatagcatatatgacaccattttacttgatgcttataaattcatttaagacaagaagagagattttttcaaacacaactggtcttcctgatacatggaattttcagaattatttagatgctatgaaaaaaatgagtgtaataagttcatttgcaaattctatgataataactataggaagtgtggtactaataattcttttttcatcaatggcttcatggatgctagtaagggatcggtcaagaaagagtaagataatattttatatattcacttcgggaatgattgttccatttcaagcagtaatgataccgcttgtaaaatggatggcaaaaatccagttcggaccatttcaaatgctaggaacacactatgggcttatttttatgtacatagggtttggggttagcatgagcatattcttatatcatggtttcattaaaggagtaccaaaagaagtcgaagaagcggcaactatagatggatgcagcaaatggcagacatatatgaaaattctattgccattattaaagccaattactgttacagttgcagttttaaatagcatatggatatggaatgactttttgctaccatttttaactataaacggaaagataaatactataccattagctatgaacaatttcttcggagcattttcaaaacaatgggaattagcaatggcagcattaattttagcaataattccaataatcatattctatttctttgttcaaaagcatatcattgcaggtattgttcaaggatctataaaatagtcattaagagagcgtatattggctatggttactatattcttattaatgtagattaatatgtttctttgcgcaagcgattgctttaagcatgaagagaatagagattagttatacaaataaatttaaaacaaacgttggaaattaggaggaatatatgaatagaagtagtggtataataatgcacattgcttctctgccaggaaagtatggaatagggacatttggtaaagaagcatataaatttggagattttctaaaaaaggcgggtcagaagtattggcagatactgccgctagggcctacaagttttggagattcaccatatcaatctttctcggcatttgctgggaatccatattttatagattttgatattttaagacaggatggatttttagatgagagcgattattattcagtgaactttggggaaagttcagaggatatagattatggtttgatttttaaagaaaaattaagggtattaaaaatagcatacgaaaaatttaaattaagacaagataaggatttaattaagtttcaagaagctgaggcctattggcttgatgattatgcattgtatatgtcaataaaaaaacattttgatttgaagagctggtatgaatgggatgaagacattaggttaagagaaccagaggcaataaataggtataaaatcttattagaagatgaaataggattttggaagtttttgcaatatgagttctataaacattggaataatttaaaagcctatattaataatttgggaattgaaataataggagatatgcctatatatgtggcagaggacagtgctgatgtatgggggaatcctgaagcattcttacttaataaaaatacactaaaaccattaaaagttgctggatgtccaccggatatatttgctgccacaggacaattatggggaaatccgatctatgattggtgctatatggggaaaacggactataaatggtgggttgatcgcataagacaaagtttgaacttatatgatgtacttagaatagatcattttaaaggatttgaatcatattggtctattccttatggagatctaacagcagaaaatggtgaatgggttaaaggccctggaataaaagttttcaatgcaattaaagatgagcttggtgaagttaatataattgcagaagatctaggtacacttactgaagaaacaataaagcttagaaatgatacagggtttcctggaatgaagatattgacatttggatttgattcagatagctcaaatccttttttacctcataactatgaaaagaactttatagtttatactggtacacatgataatgatactgtaagaggatggattgaaaaaacagcacctaaagaagaagttcaaagagcaataacgtatttaggtctaaataaagaagaggggtataactggggatttattaggggtgcttggagcagtatcgcgaatatttccatggcacaaatgcaagatttcttgaatttgggaaatgaagccagaattaatttgccttcaacattggggaataattggcgttggagagtaaggaaagatgcattgacagatcaattagcagaaaaaattcatcagatcactagaacttatggaaggtgtgataattaggaggtactatagcaaaagtaaaggatagtgataatttatatgaaagataatctctacaataatatatactcattaattatggtggagattaactacgtatttatttgttaattagatagcgtgcctcaatttatgattcctagtaatagcaagaaagattatttgattgctgtttaataaaaccatatatatggcaattgtaacattattttaagtatgttaatattaaaattattaaaggaaaatagttataaagcgtgacatatataagtttttactgtcattaagcgattattcctaaaaagatagtatattagaatgtgattaagatgtttttatgttagtaaactttataagtaatttattattgagaataggagtaagttatgaaagttacaataaaggaagtagcaagagaagcgaatgtatctccatcaactgtatcgagagttatatcagatagttcacagataagtgaagaaactaaggaaagagttagagatgcgataaagagattgaaatacaagccaaatgcgatagctaggagcctggcaaataagaaaagcagaatattaggtgtggttttacctaatgaagctcaagacttgataactaatacgttttttattcaagctatgaagggaatgagcaaatacgctcaaaacaaaaagtattatattacatatgcatttagtgaggatgaaaaagctgaattggaatatataaataatttcataacaagtaacttagttgatggaatatgcttattacgtgcaagaactgatgatagaagtattaaatatcttaaggaaacacaattcccatttgtagtaataggaagaccggaagaatcagaaaatttgctatgggttgataatgacaattttcaggctacttacaatttagtaaatgaacttgtaaagaaaggacataaatcaattgcttttctaggcgcaaagaaggaatggaatgttacaaaagatagatttaaaggatttaaagttgcatgcgaaattaacggaatttcaatacacgataaaaattttgcgattatggatgattttaatgaacaggaaggaatagatggaacaattaaattgttagaaaatattactcctacagccataatagcagaggatgacgtattagcatttggtacgcttaaggtactcaatgagagaaaaattaataatatagatgtggtgggatttaataatagtccattagcggagcttcaagtaccatcattatcatcagttgacattaagtcagaagaactagggtattatgctacaaaaattttgatagattttctagaaaataatgatacggcgataaatcactatattatagatactaagttagtaaaaagagaatcatttaaataacaaaatgtgatatttgaatttatataattgcaagtaattgatgagagctaaaactttatcaacacttattaggttttattaaatattaggaatacattttagataaaagaattcttttgcgaacaaatattgtttggatttagagggattattgcatataaaatatagaatcaaaatgtataatatgttagtatttgtataaagataactcaaaactagaaagttaggggtctatatatgaatgataaaaactctaagataagtcatggagaaacatacataagagataagaagaaaaaaagtgattatttaaaatatataacttttatattggtaactatattagtcttaactagttctttaatctatttaaagtatagagaaggattaagcaataaaaaaaatacagctaacgataaagtaaatggagaaactgataagtcaattgatgataattataaaactaatcaactcaaagaaccaataaagaaaacgattgttatttcttttgcaggggacttcactttagggactgacactaaattcccttatgatggtagcctaccagcagcgtttataggcagtggaaagaattattcttattttatgcaaaatgtatcgagcgtatttagtaaagatgactatacactagtgaatttagaaactacatttacagattccaaagataaagcacataaagatggagaagtattttataattttaaaggacctaaggaatacgttgacattcttactagcggatcaatagaaggtgttacgatagcaaataatcatatctatgattatggaaagcaagggataaatgatacgattaatactttaaaagaaaagaatattgatatatgtggtgaaggatataaaatcttaaaggatattcaaggaataaaatttggatttttagggtatacaggttgggaatattctaataatttaaaatctaaaataataagcgatattagtgagttaagaaagcggggagcagaagttgtcattccatactttcattggggagtagagagaaaatatgaaccagatgatgttcaaaaaagtttagctagattttctatagataatggagctgatgcggttattggttctcatccacatgtaattgaaagtatggaagattataaggggaaatttatagcatattctatgggaaacttttgcttcggaggaaattccaatccatcagataaaagaactttcatacttcaaattaaagttaatattgaagatgataaattatctagtcttgagtataaagtaattccagcaatgatttcttcaagaaatgataaaaatgattatattccaactttagcaggtggtgagaatagggctgaaatattagggaaattaaatgaattatcgccgacgctaaatgggaatattaaagatgagttttttaaaattaaatagagtttttattgttaataaatatgaaaggctgctttgaaataattacttcgaagcagcctttaggttaagtggaattatttataatatgtctttagccatattattgttgcagaattgaaagataaatgtaaggtttatcaatataagaataattaaacttaggttattatataagtgatatgacaggaactgatttatattaagcttttatttaaggaaaaattaatgttttgttaagggttatgttaaagcattagtgatatactgatgaatattagattgataaagttacataaattcaatatatggaagtttgtaagggtagtgtaagaattaatgatgcttaaagagtaacatatatatgacaatgttagttaattactattacatggataaaaaggctgttaagaatagggggaagttttaaaaatgccgaaattagatgtgaaaaagttaaaacctaagggcataagtcttaaggggatgaaactaaaaaagaagccaagcaaaaaagtagtattaatatgtacaatatttataataattggagctatcataataggaaagtttcttatgcctaagtcagctccgcaagtaaagagtacagttctttgtaaggggaagattgtaaatagtgttaatgttttgggagaaataaaaagtaaagaatcaactaacatatacagtaccttgaacaatccagtccaagagttaaaagtaaaagagggagataaggttaaagcaggagatgttctagcggtactagattcaaatggattagaaaaagatattgaacaggctatagctacagcagatgcaactgaagctaatgctaagacacagcttgattcagctcaaaaggaatataatgatgaattgaatttatataataacaattcaaatgcagatattaaaaatgcagaagaaacactaagtttagcacaaattactcttgatgataaagcgaaaatatatgataagaataaagccttatttaacgctcaagcaatttctgagagcgacttaaataagattaagatagattatgacactgctaaatcagattatgagaaggcaaaaacagctcttgaaaatgctaaggttaaagttgaccaagctcttaataaggctaaaagtgactatgaaacagcacaaacaaactataataataaaagccagagaattgcgattgagaagcaaaaacagcagctagatgattgcactattaaggctacaagtgatgggatagttacaaatgtaaatgctgttgttggaaattcaggaaatggagttttatttcagatcgaaaatttagataatatagaaataactgtgccaattaaggaagtcgacatagctaatgttaaagtaggacagagagcagaaataaaaacagatgcaacaggggatgaaacctttgcaggagaagtggaaagtgttagtccagctgctaaaaagggagggggatctgtacctcaagcacaatctgaaaattcacaaagtcagtctcaaggagcaagctcagatgcaggttttgaggcaaaaattaaagtggatgatacaaatgagaatatgaaggtaggaatgagtgcaaggataaatattattacaaatgaaaagtctgatatttatacagttgcatctaatagcatagttgaaagtggagataccaagagtatatatgttgcagaaaaaagcagtgaaaaaccaaatgaatatataattaaagagttaccagtagatacaggacttgaatctgatttcagtgtagaaatttcaggtggaggaatatcagatggaattatcataattgatgacccttcaactcataaagttggagaaaaaattcgaataagtggaaggtgagttttttgaatgataatataatagaaatgagaaacatcgtaaaaagcttttatattggaactcccaatcaattagatattctcaagaatatagatataacaataaaagagggcgaatttgtatcaatagttggtgcgtcagggtcaggaaaaagtactttaatgaatattataggagcacttgatagaccaacatctggaacatatattttaagtggaacaaatgttggtgaaaaaacagataatggattatcagaagttagaaataagaaaataggatttgtgtttcaaacttataacttaataccgaggagttcagctttgaaaaatgttgagttaccaatgctttattatggaatgggaaagcaggagagaaaagaacgggcagaaaagcttctagaacttgttggaatgaaagatagaatgaagcatcttccaaatgaattatcaggtggacagaaacagagagtggcaattgcacgtgcacttgcaaatgatccaagcataatacttgctgatgaaccaacaggagcacttgattcatcaactggtaggctagttatggatttatttcataaggtacatgaaatggagaagaagacaattgtctttataactcataattatgaacttgcaggagaaacagagagaatcataacattgaaggatgggaaaatagtatcagaagaacataacgacaaatatactagaaggtttcaaaatggtgaaaagttatgtttataaaagagaatatagcacttgcgatagcaggtataaaatcaagcaaaatgcgttcgttattaactatgctcggaattataataggaatatcatctgttatagggattgtttctattggaactgcaattacatccaccgtatcatctcaaatggataaaatgggtgcaaataatatagatattggtatagcggtaaaaaaagaagacggaactgctagtgggaatgggactagtaaacagccagaagatagtgatcttataacaatggaacagataaattcatttaatgaagtatttaaagataaaattaataatataagtgtacaggaacaattaggacaaggaaaagtaaaagacggatattcttatgcaaatgtaagcaccacaggagtaaatgaaggatacaaacaggttaaaaacttgaaactaattagtggaagatttatcactgatagggatgttaaagcaaattctaaagtcgctatagtttctgataagcttgttaataatatctttaagggaagaactgatccgttaggtaaagaaattaaagtctatgcaaatgatgatattcagacatatgttatagctggtgtatatcaatatgaaaattcatcattatttggaatgggtgaaggttctacatcagaaaaggacagaagaacttctttatatatccctataacaactgaaaaagcactacaaaaaaataaaaactttgagtattttactgtagtccctaaaatggggatagacaaagggaaattagttagcgatatgcaaaagtatgggaataagatgtacaagaataataagaattggacattaatggttcagaataatgaagctgatgcggcagaaataacatcagtgcttggtatgatatctatggggatatctgtaattgcagctatagcattacttgtaggaggaataggagtaatgaatataatgctcgtatctgttacagagagaacaagagagataggaacaagaaaggctctcggtgctaaaagtagtcacataaagatgcaatttataattgaatcagttataatatgcaccattggtggaacaattggtataatacttggaattgggatgggaataattgcatgtatagtattaaaatcaccaatatcaatatctattccaacaattttaataagctttactttttcaatggcgattggtgtgttctttggatattatccagctaaaaaagcggctagccttgatccgattgaagccttaagatatgagtaagcagtatgaaaaagtagtagataaaaaataaaacacatatatcctaaagaagtttaattcatcgaagttcaccttaaactagtgaatagtaaaaattatatattctataaagaatgaattgtattatttaaaatgtatatgcaaaatatgattagtgttatgaaggttaaatttgtgaagatagatattttattaagaattaaaatatctatctgttttttatttagaagaagtcttaaggtaggaatgaaactttcataatttaattacatagaaagtcgatatttttactaataattgttgacaagtttctgtaactatgtataattagtattaacaaaaaaatatctggataagttaatcttattaagagcggtggagggactggccctttgaagcccggcaacctgaaagattttatatataaattttttcgttggtgctaaatcctgcaagagaatatcttgaaaaatgagaggaattaagtttttgtagaacttataatatgactataaagtcacttcttgttttggaagtggctttttttattaatattatctctggtattagcaataagtaattcattaagcaaagcaaatttaaggaggcaaaataatgactttaaaaaaatcttttgaaacaattgcagtcagtggagtatcaggtggagataaagaaacaggtgctataagttttccaatatatcagtctgccacatttaaacatcatggccttaataatagcacaggatatgattatgcaagagctcaaaatccaactagagaagaagctgaaaaaacattagctgttttagaaggcggaaaatcagcgatagggttttcttcaggagttgcagcaattacagcctgtatacatttatttaagtctggagatcatataatcttatctgatgatttatatggtgggacatatagattgtttgatgatatttttagggattttggattagaagctacctttgttgatactacaattactaaaaatatattgaattctataaaagaaaatacaaaggcaatacttatagaaactccatctaaccctatgatgaaagtaacagatataaaagcagttgcagaaataacaaaagcaaataagttactgttaattgtggataatactttcttaactccgtactatcaaagaccactagaactaggagcagatttagtagttcacagtggaacaaagtttttaggtgggcatcatgatttacttgcagggttcatagtagcaaatgatgaagaaatattagaaaaattaagaagaattcacatgtcaacaggagcgaccttatctccctttgattcatggttaattttaaggggtataaagactttacatataaggttggaaaggtcacaagagaatacacttaagatagctaagtttttagaaggtaatcctaaagtagaaaaggtgtattacgtgggtctagaaggttttgaaggatatgaattaaataagaaacaatcgacaggttttggggcaacattatcgtttagagtaaaagaaaaagaattagttgccaagattttagaaagagttaaagtaataagatttgcagagagcttagggggagtggagacactaataacatatccatttactcaaacacattcagagataccggaagaaattaagcaaagacttggagtagatgagtatctacttaggctatcagtaggaatagaaaatgtagaagatttgttaaatgatctagaaagtgctataggaaaatagaatttataataaaaaatagaatggggcgttaaatatgaattttggaactaaattaatacatgcaagtggggatatagatcctacaacagggtcagtaagcactccaatatatcagacatcaacatttcaccaatttgatatagaaaacttcggaaaatatgattatgcaagatcaggtaatccaactagagatgtagtagagaaattaattgcagaacttgaaggtggtgagtgcggatttgcatttgcatcaggaatggcagctatttgctcagtattatcgatattctctgcaggagatcatattataatatgtggagatgtatatggggggacatatagagctactacaaaattattctcaagattcaatatagaattcacttttgtagatgcatcaaatattgaagagatagaaaaagcatttaaagaaaatactaaagggctttatttagagacaccttcaaatccgctgctaaaagttatagatttaagaacagctagcaaattagctaaagaaaatggggcaataactatagtggataatacatttatgtcaccatacctgcaaagacctattgaactaggagtagatattgttgttcacagtgcaactaaatttcttggagggcatagtgatgttatagcaggtcttgttgtaactaaaacaaaggaattgggagatagggtgtatcaaatacaaaatacttttggggcagtacttggaccacaagactcgtggcttttggttagaggtatcaaaacattaaaagttagactagatgcacttcaaaaaagtgctcaaaagctagcagaatggcttgaatcaagagaagaagttgaaaaggtatattatcttggattaccttctatggagggaagagaactacatttagaacaagccgatggagcaggtgctgtattatcatttaaattcaaaacatttgaaagaacaaaaatatttttaaataatgtaaagaatgtagcggtagctgttagcttgggtagtgttgaaactatagtttcatatccagctaagatgagtcatgcttcaattccaaaagaagaaagagaagagcttggaataacagatacattgataagagtatccgtagggttagaagatatagatgatttaatagagtcatttagagaagcaatggagaaataaaaaattacagagataagttatatataaaagttgatgaaaaagggtgatttatataatcatccttttttaatgcttctgattagaggaataattcgattaaatttggtgaaatgaaagaaatagaattaatcgagatattataatttaaaaaatatcctttatgtaagcaagtgattaggtaagtgttattttaatttttttaatatatttataaggtttattatggaatcatctaacgtaattacttcatcatcagaaagagaagaaattttttcagcgaaagagctacagatggcattacgaagagaattcagtaaatcataagcttttggtgttagttcaactctaagaatccttctatcattaggatctggatatctattaactaattcataattaataaggttgtctataattggagtcatattagattttgatatacctatattatctgctatttgagaaataggagatgaattactgtgaaaaagatagaatataactctggcgtgtgaaggaggaatagaaaaatcagagcagcattgtttattattttcatgtaatgattgaaaaattttagatatatcttgtactttgaatatattactttgaataatccataaaaagttaattaaggaatctgcaactttaaataaattttctttttccatattaaaacaaatccttcctgaggtggtatattagtaaattataaactattgataaattgaagacaatagataaggattattgtaatatttaatatacttaataggttaaaaacacttactaagtatatttttttgttttgtaaagataataaaagtatgctttcttttcgatcattttaggctataaccatgtattttcaacagtttaacattaactttaaatttgtcattgaaaacgtaactcaaatttgaagttgtttaaattgaaaaggtattcttcatagtttaagatagtaaatgaaagaactaataataaattatataaataaaaatagatggaggttttattatggaaactaacaaatcgtctcttaaaggaagcgtgcaaagattaggtagttttttaagcggtatggtattacctaacattggtgcatttattgcttggggtttaattacagctttattcattccaacaggatggattccaaatgaatatttcggtaaaatggtaggccctatgttaagttacttattaccattacttattggatatacaggtggtaagatggtatatggtcaaagaggagcagtagttggtgcaatagcaacaacaggagttgtaattggtgcttctatcccaatgttcttaggagcaatgatcatgggaccattcggtggatttgtaattaaaaaagttgaccaattcctagaaggaaaagttccaacaggttttgaaatgcttgttaataacttctcatctggaatttttggaggaatcgtagcacttataggttatacttgtattgaaccagtagttacagctttttcaaacacattaggaagtttagctactatagttacaaatatgggacttttacctctaatagatatattcattgaaccagctaaagtattattcttgaataatgcaattaatcatggaatattatctccacttggaatacaacaagcacaagaagttggtaagtcaatattcttcttacttgaagcaaatccaggtccaggtcttggtatacttttagcttacactttctatggtaaaggaaatgcaaaacaatcagctccaggagctataataattcacttccttggaggaatacatgaaatatatttcccttacattttaatgaaaccagcattaatattagcagcaatagctggtggaatatgtgcagatttaacttttgtattaactcatgctggacttgcagcaccagcttcaccaggtagtatatttgcagtacttgctatgacaccaaaaggtagctatgtatctgttttagcaggagttgttgtaggtgcaattgtatcgttcttagttggttcaataattcttaaggcatcaaaagataatggagaacaagacattgatgaagctcaagctaagatgaaagatatgaaagcagaaagtaaaggcgcaaaagcttcagaaactgcggctaatgtatcaaaagcagatgttaaattaatagtttttgcttgtgatgcaggtatgggatcttctgcaatgggagaatctattcttaaaaaagcattaaaagatgctggaattactgatgttggagttaagcattcatcagttgatagcattccacaagaagcagatgttgtattcactcaagaaaacttagttgaaagagcaagaaaatcagctagaactgctaatataattacagttaagaacttcttagatcgttctaagtatgatgagtttattaacacattaaaataataagatattattaactagagtagaatttagtaatataacttacaggcattggtaaacggactgatttaccaatgccatttttaaatttgataaataatagagatgagagtggatgatagtcaaactttaaatttgtcattagaaatgtatcacagttttgaacttgtttgaattgaaaggatgtttcatatagggtaatatatatattgaaagaagcaataatttatagtaattaaataggaggttttattatataaaactttatttagacaaagtgacttccagcttgaactttggataaactggtagctctgatgataacgtttatgatacaacgggttattaactttaaattagtagttttatttaagatgtgtgtatggtatcttctttaataggaaaatctatgtttaaaagaatttaataaattcaaaatctaatgacatctgaagattctacttgaagttaaaattaattgttatagatatgatcagtctatcaatatatacaaaataatagataaatcaggtgagatattatgaataatttaacgcctagacaacaattcatattaagtacagtattaaatgaaggaacttttaatataaaacggcttcataaagatcttgacataagtgagagaactattttaagagaactttcttctattaataaaagattgaagaagaatagtataactatatttaatgacgaaaatatgaatttaagtatttcaggtaataaagaaaatatagaggagataaagaaatcattagatatggttccgattccttggctattaagtaaagaacagagacaaatagttatcatatgtgaattattagttagtaatgagccactaaaagcttcgtacttttgtcataagttcaatgttgtaatgggaagtataagccttgatatagacaacattgaagaaagactaatatctaagaatttatgcgtgattagaaaacgtagctatgggataagtattcaagggtcagagtggaataagagaaatgcattagtggagctattctttgattttaaaccttttgaagatttaatagcatttctttatgatgaaaaggttgatccgatagttaaaactttgtttaacattgtttttgggaatgaggctatccaattagtaaaggatatattaaaagatatagattttgattatcttaaaggaaatgatgtcaaatactttagtttgtttatccaagtattgctatctataaaaaagacaaagaatggagaaattatatatttacctcaagagattaaaaatagtatattatctttagaggaatataaaaaaatacaatatttaggtagtgttctgcaaaagaataatatagatatatgtgaagatgaacttgtttacttatgtttatatttaagtgattacaaatacttttttaacaataagcatcttatagaatcagacattaattatgagaatattgctaaagaggttacagaggaaatatcaacaaaaatatatgtagatattactaaagatgagcagctaataagggatttgactcagcattttaaacaaacattttatatgttaaatttaggattgaaagttataaatcctttgattaatgaaataaaagaacattattcagagttatataaaattataaaaaatacttgcagattaatattctctaggtacaattttaagattcctccagaagaggttggatatataacaatgcatattgctgttgcagtacaaaagcaacaggcgatgtcaaagaatataaaagcacttgttttatgtccaagtggcataggtactgcaagaatactttgtagtaaagtaaagtcgatatttaatgaaatcaatgttattgatgtagtatccttacatgacattaatagtataattgataaaaataaatatgatttgatcctatccactgttcctgtgaacttgaaaacaaagcataacctgattgttgtttctcactttatgactgaagtagatatagagaatataagtaattttatttctaactttaaagctagtaataatgaaagagaactagaattatttgctcaaacaaaagacaatacagtgacaaatcacgaatatgaattagccaatacgatggttaagaattttcagctaaaaaaatcagatagtgattcatttattaatctaataaattatatagtagatgatattcacaagattgatattggaacagataaagaagtaataagggatcttatatttaagagagaggaaaatggaaatgttgtaattccgggaactcatgtagcccttatacacacaagaagtgatacaataactgctccatttgtaggagtgtatagaataaataaacctttatctatgaagagtataggattttccacagaagatgtagatacctttatagtaatgtttgcaagaaatactgaaagtaattatatacttaagattcttggaaaaataagtgtttcattaatagaaaagaaagaatttgttgaaatgctaagactaagtaacactatagatattagagattatttaattaatattataaataacgaggaggaagactaatggaaaaaggaattttagtaaaagaaggaatagtattaaatgttgcgtcagaatctaaggacaaggcgatagaaagagttggtaaacttttaattaatgggggatacgttaaagacaattatatagagggaatgaaagctagagaagaagaagttacaacttacatgggaaatggtgttgctattcctcatggtatgaatgaatacaagaaagaaatacttgaaacaggaatagttatagctcaatatcctaatggtgtagattttggtgaaggcaatactgcttatatagtaataggaatagcaggaaaaggcgatgaacatatggagatattatcaaagatagctttaactattcaatatgaagaaaatgttgaaagacttagaaaagcaaagacaccagaagaaataatggagattatagaagaaggagaaatgtaatatgaaagcaattcaattcggtgcaggaaacataggaagaggattcataggtgcattactttcaaaagcaggatatcacgtagtatttgctgatgtaaataaagaagtaattgataaaatcaatgaagataaaaaatacacaatacatgtaatggatgtaaattgtgaagaaatagtagttgaaaacataagcggagttatttctataaacgatgaaattttagatgaaataaaagaagctgaaattataacaacagcagtaggtcttgttgtattaccaagaatagctccaacaatagctaaaggaatacaacttagaaaagaagcaggaatcaaaacaccattaaatataattgcatgtgaaaatgcaataaaagcaagttctcaattaaaagcagaagttgaaaaatgcctaagcgaagaagaaaaagcttatttagaagaatttgttggattcccagattgctctgtagatagaattgttccaccagttaagagtgaaaatattctagatgtagtagttgaaaaattctatgaatggaatgttgaagaaaaagcattcaaaggaagtattccagcaattgaaggaatgaatttagcagataatttaatggcttatatagaaagaaagctattcacattaaatactggtcatgcaattacagcatatataggaaatttaaaaggttatggaacaatagatgaaagtatagctgatgaaaaaatatataatgttgttaagaaagcaatgacagaaagtggaatgggcttagtagaaaagcataaatttgataaagaagctcacttcaaatatatagataagattattggaagattcaaaaatccttacttaaaagatgatgtatcaagagttggaagagaaccacttagaaaattaagtgatagcgacagattaataaaaccattaatgactgctagaggatttgacttaagcgttgacaatttattactaggagtaggtgcagcattacactacaataatcaagaagatacacaaagtgtaaaactacaagaattaataaaagaaaagggcgtaaaaggagctatagcagaagttgctaatatcgatgataatgacttattagaaaagatagaaaaggcatataatgacgttttagcaatatagaaagctcatttaaggtggataattatccaccttaaatattttattaataatttttagtgatttaacatattaataattaattatctgaagatgattttgtaaccaaaaagtaataataaaatatatatataaatatagacaattgaaaataatatgataaaatagtcaaagaggcataaataaagaaaacagaggtgatgaatggagaagaaagaaattcttaaaatcaataaaaagcgccaggactaagtggaatttagttgaaagtgaatttttacagggttggtttttataaaaggaatttagttaatagtaagctttgatataagctacgcgaatagctaatgaaatctttttaaaggaaactcgactcacgttcgttcgctgagtaaattcaactatccaaatcgaagatttggagtttcatttacgtcgacgaggttggggagtatcgaaacttcggcgggtgccccacggtatcgcactaccgtaaacgactggtaaaactgtgaagtgattcacaggacaaattcagtctggtgttaaaacctttgttttaattttaatttctaggattactatgcccttttataattgtgctaggaatgaagttaaaagaagaattaaaattaaatattatatgaaaaaagagaggaagaataaatatgtgcggaatagttggatatttaggaagtagatcagcaaaatcttttttagtagatggattatcaaagttagagtatagaggatatgattcagcgggtattgcagttgttaatgatggtaaagtaagtatcgaaaagcataaaggtcgtcttactaacttaactgataatttaggacaaggcaaagctgaaggaacacttggtatcggtcatactagatgggcaactcatggagagccatcagatattaattcacatccacaccaaagttcaaagggagatattactgtagttcataacggaattatagaaaactatctagaacttagacaatggcttaaaggagaaggatacgaatttgtatctcaaacagatactgaagtaataccaaatttgattcattactattatgaaggagatctttttaaagcagtagttaaagctactgaaagattagaaggaagttatgccctaggtgtagtaactggagcagaaccggacaagctaattgcagtaagaaaagatagtccgctaattgttggtttaggacaagatgaaacatttattgcttcagatattccagcgataataagctatacaagagatatctatcttttagaagatagagaatttgttgttataagcaaagatggcgctaaaattttaagcgctgatggaagtgaaataaagaaagatgttttcaaagtaacttggaatgaagatgctgctgaaaagggtggatatgattcattcatgttaaaggaaatcaacgaacaaccaaaagctattagagatacaatggcatcaagattgtcaatgagccatgatatcacttttggagactttaagttatcaaaagaggatcttaataatatagatagaatctttatagtagcttgtggaactgcatataatgcaggacttatgggaagagtagcaattgaaaaattagcaagaattccagttgaagttgatatagcatcagaatttagatataaagacccattagtaactgataaatcccttgtaataacattaagccaatcaggagaaactgctgatacattagcggttcttagagattgtaagaaagctggagctaaaactttagctataacaaatgttgtaggaagtacaatttctagagaagctgacgacgtactatatacaatggcaggtccagaaattgcagtagcttctactaaagcatatacaacacaagttgttgttatgtatatgatggcaatgtatttcagtgaattaaagggattaatgactaaggaattagaaaaagaattaaaagaagcattattattagtacctgaaaaagttcaagtaattttagataaagcaagtgaagtagaagaaattgcaaatcttttaactgatgaaacagatgtattctatttaggtagaggtgcggactatgcattatctatagaagcatcgttaaagcttaaagaaatttcatatatccattcagaagcatatgctggtggagaattaaaacatggaacaattgctttaattgaagaaggaactaaagtaatagcattattaactcaaaaatcattaagagaaaagatggtaagtaatatagttgaagttaaagctagaggagcagaagtaattgcaattgcttacgaaaatgatgtattagatgaatcaattttcgataaagtaattagaattccagaacttcttaacttagtttcaccaatagttgctgtagttgcattacaacttttagcttactatacagctagaaataaaggttgcgatatagacaagccaagaaacttagctaaatcagtaacagtagaataattcataatttaaaacaatttatgtagcttttaaaaaaagtataaccctttaaaaaaagattaactttaataataaagcatataaagctagatatttcaagtgaattagaaatgtctagcccttttttctttaggagatgaccagatggctaaaagaaataaagtaaatgtagatttgtaacaaagtttgattacttataataaaaatcgatcatttgtaaagtttgatcaaaatacattataaaattaataggtaactttttataaatggcttaactaggtaaaaattaattagttttggttaaactttattataaaaatttttattaaattcttatgtttaagatatgttttgatcaaactttgttaaaaaatataaaattattattatggttttaagccattttccaaaggtgttctaatcaatctttattcaaaaactacaacaaattctgtttattcaacagcctatataatgtataaaaatttactttttatttatgaatacgtgtgtaactaatatattgaataagttaattatgttacccgtggaggaatttacctctgcgggttatttgttgtacgcgcagtatgatagcaatctaacaggtgagagccaatagtgtagattgctatttccaagtatatagcaagggtttgccctatgacgagggagaggaaaaaagttaatagtcgtgatggtaaagtctatcttagtaaaaaaatattaaaaaaagttaaaaaatacactcacaaatacggcttttaagtatatagcatacgaaatttgaaatttgtaatgattttttttattatcttggcatactaaaatcatactataactttcatacacatatagtaaaaattcaatactattttcattaaatgtataaatttttgcataaaaataattatacttcaaaataagctgatatacttcaaattattttctttttgtgttagattttatacatttagtgaaaattctatttaaatttttctttagagtgataatatgtgattgttatctttatataaattaataataagattaaattaatgattagttgagtaattaagattatagatatttataggaaaaacacaaattaatgtcactgtactttttgttattagtcaattattaattttgtattaatgggggtaatcttatgacagaatttgtattcaaggtaataaattttaagctgggacatacaaatttgactgtgtggatgcaaattctaaaaattatggccaaattgtgtgatgatgtaaactttttctgcgtgtaatttaatgaagatataattgttgaggtgaagagtaatgaaagaagatcttaaagctatacttgatagggatccggcagcgagaaatatcttggaagctattttatgctatccaggattccattcgataattttacatcgcatagcacataagctatacagattgcgatttaaactattagctagaataatatcaatgattaacagatttgttacaggtatcgaaatacatccaggcgctaaaatcggaaaaggagtttttattgatcatggaattggtgttgtaattggtgaaacagctgaaataggtaataatgtgacaatatatcagggggctactataggaggaacaggaaaagaaactgggaaaaggcatccaacaataggaaataatgtggttattagttctggtgcaaaagttttagggccatttagggttgggaataattcgaaaattggggctggagctgtcgttttaaaagaggttccggataactcaacagttgtaggtattcctggacgtatcattaagagaaaaagaaaaaaaaataaactttgtgaaaaaataagtatagatttagatcaagtatctctccctgatccaattagtgatcagttgaaatcctttgaagagagacttgaaaaattggaaaaaatgattgaggatttaataataaaaaaggtaatttaagcgttaatagtgtgattaaaaccgccatctctagacaataaaaaattatgctaatttataagaatagtgaaatgatatacacgaatataatctgggaagcgaagtgtatgtgatgggaggtattggaaaaatgcttaaccgtcaatagctttaaaatttcatgaattagcaaagtaaagttgtaatattgctagaagtagtattataaaatatgtttttattgtcaatagaatgttccagtaaaaagtgatagtagagaaattatatttaagattgaacaagggtttccagcaatgtttggtgagtcgcttaagagagatggtaataacttttagtctaaggtgtttatcacttagactaatctactttaattggtggggaatttaataatatgataaatgataaaaatagagtgaaggtgaaacaatggaaaatataagattattctgcttgccatgtgcagggggatcttctcagatgtattctggatggaaaaaatatttgaatgagtgtattatacttcataatgttgagttatctggcagaggaacgcggtttggttctgatttatataattgttttaatgatgcagtagatgatgtttataattcaataaaagattatttagataaaggtccatacgctttttttggacatagtatgggcggttggcttgtgtatgaattagcctgtaaaataaaggaggaacatcatacaagccctgcgcacattttcattgcagctcaagaggctcctcatattctacaagataggcatttttttctacataaattacctatgaatagtttcaaaaatgaaattataaaattggggggaataccaaaagagctttgtgaaaataaagaaatttttgatttttatctgccaattataaaatctgattataaaattactgaaaactatgtttggagagaaagaaaggataaattggattgtgatttcacagtgctttatggaaacaaagataatattgagatagataaagttctaaaatggtgtgagttaacagaaaaagaaagtaaaacctatagttttgatggaggacatttttttattgtcgagtatgtggaaaaggttaccgatttgattaattatcgattagttaacaatattaattaatataaaaaagattttattatatttctaatttttattgaaaacttgaatttaagaagatagaattggaggaataattatgattaatattaaaaataatgaaattaaaagaaaaattagtaagaaaatttattggtctccctctgttttttgggaaatacttgataacaagctcaaaatagaaatgtttctttatgatgagtttgcgatgaatttgtttcctgagttcttttttttaacccaaaggggaattgaagttaataatttgcttaatgaatttccagaagtagatcaaaagaggctgaatttattaataaaggatttaataaaaaagagaattcttgtatcaaatttattaactccacaagaggtattttttcctcaaagccgtatatttgaaacagaatatggtgatgaactattatatgatgctaatgcacttaaggagtttaagaaaaaacaattaaatagaacttttgaagccagcatagataaaaaaatatattttaatgataattttgaatttccagaaaatatagctgatcgaaaatcatatcgtaagtttgatgaggaaaataaaatttcttttgatgatttttctaaaatgatatctatttttaaacaaataagaaatgaaaatgaaacaagatattattatgcgagtgctggtggactttatcctattgatgttttcttatacataaagaaagatcgtatagaaaatattaaccaaggtatttattattataatccaaatgaaaattgtattcaactagtaaatgatcattcaataattagtgaagaagctcatcttttctttaacaaagatatttttaaatcatcagctttttcagtgtatttaatttataatgtggatgctaatatggctaaatataaatctgatggttatttttatgcatgtcttgatgctggaataatgatttctgctttgactcaggcagcagaattggtaaatgttggcttgtgttcaattggtgaaatgagttttagaaaaattgaaaaatacttcaaattaaatgaaaggcaaatttaccttcatactattgaaggtggtttaaaacctttagaataattaaataagtcataaatataatctatgaaaactcggggagtgaagatattgtgttaactaaaaaatctttaagcaaagttttacaagataaggtaagtgttagtcataggggatttacggtaattgatgatgagaaaaaagagaaattcatttcatatcaagatttgtttactacaagccagaaagtattattcaatttacaggtgcagggatttaaaaaaggagatgaagtactttttcaagttgaaagagaagaagattttatttatttttcttgggcgtgtattttgggtggaatggtttcagtaccattatcttgtaataacacacatgaaaatataatgcaagtttcgagagtctggaaaatactacaaaaacctaaactaatttcaacaaaagaacaattaaaaagcattgtagatatattaaataatgaaaattgtggtgatattgctgatgaaataaaacagaatactttattagataaggatattctagtgagcaacggaattggtgaaatagcttgtggagatataagtgatacagcatttgttgttttttcatctggttcaacaggagagcccaaaggaattgtactaacaaatgaaaagattttatgtgctattgaatccatgtcttctcatttagatgtaaattcatcagatgtatttttaaattggatgccattgacacatgtaataggcttagttctttttcatgtactgcctgtggcctatgatttaaatcatgtggtaatgtcaaagaatttatttattaaaaatcctgttttgtggttagaaaaagcagatcaatataaggcaaccataatgatctcacctaatattggatttagacaatttttgaattgttttgattcaaatacaataaatatgaatctttcacatgtacgaactattatggtttcagcagagcctatatctggagatttgtcagagcagtttatgactgtattgtctaaatttggaattagaaagaatgtactttctaatttatatggtatgagcgaatcttgtttaggaattacttgtacgcttccaagtgaagatatgaagtataattgccttaatagaaattttttagcagtaggggataaaattaagtatggtcaaccaggagatgaggattgttctatatttgtcaattctggaacacctattaaggattgttttgttagaatatctgatgatacaggaaatatattaggtgatgattgtattggacatgttcaggtaacaggaaaaaatattataaataattactatacagaagaagcaacagctaggtcttttacaagtgatggatggttaattactggcgatatcggctttttagaaaatggacatcttacaattacaggaagagctaaggacatgataattgtcaatggccaaaatttttatgtaaatgatatagaaagagttgcagaagggatagaacaaattgaatttggaaaagttgctgcttgtggaatatttgattcaaaaagtcagtcagaaaaagctgtgatttttgtagaaaataatgaacctattgatgagtttgtatctcttttattaaaaattaaaaatgaattaagttataaaatgggaatagaaatttctcgagttatccctgttagagaaatacctaaaactggcagcggaaaaattcagagatataagctggctaaagaatacaatagtgggatttatgatgagatacaagaagatttagatgtgtttatagataaacacctttcagagaatgtaggcagtaaggcagaaagttatcttcaagaaaaacttcttaacatatgtagagaagtactacattatgaaaatataggcattgaccataatttatttgattatggacttcattctataacaatggcgggaattgttggaaaagttaataatgctttaaattatgatttaaactttgcggattttatttctaatcaatcagttagagaattagaaaaagttattttgaaaaaatcaaacaaaaaaatcaatgaactatacccagagtgtattccaaatcctaaggaaatgtatgaacctttcccactcacaggtattcaagaagcatatctcataggaagaaatgaagatattgaaatgggtggcgtttgtacacatttttatcaggaaatcgagacagaatacgaaatatctctgcttaacagctgtctgcaaaaactcattaaggcttaccctatgatgagagctgttattacaaaaacaaagagtcagaaaattctggaaaaggtcccggaatataaaatagaagaagttgacttaaggcatcttaataaaacagagcagcaggaagcaatctcttcagaaagagaaagaatgtcccactatgtttttgaaactgataaatggcctttatttgaattcaaatcatttaaattaacagatgatcgtaactatttatttgttagttatgatttaattatagctgatgcagcaagcatcttaaatataggaaagagtttagtagatctttataaaagccctgatactaaaatatgtactcctgaattttcctttagggattatgttataagttataacgattttaaacagtcagatatttataaaagagatcatgatttctggcagaaaaagattgctgattttccatattcgccagcattgccatataaaacaagtcctgaaaatattagaaagccaaggtatgagcgtataggtaaaaggtttagctctaatcaatgggccaaaataaaatctattgcacaaggaaagagaattacagcttcttcagtattatgtactacttttatgcaggttctctctaattggagtaatcaaaaagactttgcaataagcttaacctctttcaatgcattgccatttcataaagatgtatctagtatacttggtgattttacttctgttttaccacttgaagttcattttgacagcaataattcactatgggatagatgcataaaagtccaaaatgaaattatggaacttctagaacataggaattatgacggaattgatgtaattcgtgatatttcacgctataaaaatataggtataggaaaagcagtacttcctattgtattttctagtattctttttgaggaaggccgatttggatggtctgagataggtgaaataaaattcagtgtcagccagactccacaagtatttattgatgtacaggttatggaggataatggtgaactgtcagttacttgggactatgcagaggaattgtttgataaaacaataatcgaaaaaatgtttgagcagtatgtttggatgttagaagaaattgtccaaggtgaagagagtcattgtttaactataggtgaagaagaacaaaaaatagtacaggaatataattctacaagtgaggcaatacctgaaaagacccttcacggaatatttgtagaacaggtatcagagaatccagaaaatgtagcagtaatttatgaaaatgaaagcataacttacgaagaacttgataagaagtcaaatcaaattgccaaatgccttaatgaacatggagtaataagaggagattatataggagtattggcatacagaagaatagagacaattgtaaatattttaggaattttaaaagcaggggcagcatatataccgcttaatccagatcatcctgaagatagaagggattatattttggaaaatgcgggagcaaagatgcagttagtgcctgaaacatatgaagaaaaggaaatatataaatatgatgacagaaaattagaaaataacatccatcctgatgatatagcatatgttatttatacttcaggaagtacaggaagaccaaagggtgtagtgattaaacataaagcagcagcaaacacaattattgatatcaataataagtttaatgttaatgaagaagataggtttattggattatcatctatgtgttttgatttatctgtatatgatatttttggagcattatctagtggtgcagcactaattatgattaatgatcagagagatgtaaaaaacattaatgagataatcgaaaagcatggcattactatttggaattcagttccagcaatcatggatatgttattagatagtatcggcataaaggatgaagtagaaattgattaccgtcaatcttcatataaaaatgaagtagctgtagaatatagtaattacagtgacagcgatagtttacgattagtattattaagcggtgactggattccactaacacttccagaaaaaataaagaatcaattttcagatgcggaagtaatcagtttaggaggagcaacagaagcatctatatggtctatatactaccctattgaggaagtaaggcgtgagtggaaaagtattccttatggaatgccgttgtcaaaccaatctttttatgtattaaattatgaaaaccaaatctgccatataggagtcatgggagaattgtgtattgggggattaggtttagctgaaggttatttaaatgatgaagacaaaaccacagagtcatttattaaccataaagagcttggaagactatataaaactggagattatggtgtcctccacaaggaaggatatattgaattctttggtcgtaaagatcaacagataaagattaatggatatagattagaattaggagagattgagaactgtattttagaatatgaaggtgttagaaattcagtagtagtagatagaactcatgataatggcagaaaatatctttgtgcatatattgtaggggaaaaagaaatatctacaacagagctgcgagaatacatagtagaattgttacctgattatatggtgccatcatattttgtaatggttgatgagataccattaactgctaatggcaaggtaaataggaaggaattgcctgaaccagaggtaagtgttgaaacagaggaagagtatgctgcacctactaatgaaatcgaagtgaaactaacagcaatgtggcaggacttattagaagtggatcaaattagtataaataatagtttctttgagctaggcggaaattctgtaatgatggtacagataataactaagattgataaagaaattggagttgaaattaattttagagagtttttaaaagaaaacactattgctaaattagcaaggttaattttaagtaaaggtgtttcaaatataggaaaggttgtatacccagagataataccagatatagaaaaagtaaatgagccattcccattaacaggtatacaaatggcatatttaatgggacgtgatgataagttcgaattaggaggagtatcaactcacgtatatatagaatatgaaacaaagctggaagcagaaagatttaataagagtataaataaagttatatctcgtcatcctatgctgcgtgcagtaattcttccaagtggacaacaaaagatacttgatgaaattcctgaatataagatggaaattgttgatttacgtcatatggatagtaaagatcaagaagtttatatattaaaagaaagagaagaaaaatctcatcaggtctttaaaactgataagtggccgttattcgagtttaaaatgtttagaataactgatgaaaccaactatctgttctttggtttagacatgcttatagctgacggggcaagtatattaatgatattcaatcaaattatgaagcattatgaaaatccagaattaaacgtgccagaaataaagtgtacatttagggattacatgcttgcttataatgattttaagaatagtgaaatatataagaaggataaagaatattggataaagcagcttgatagttttccacaagcgcctgtattgccatacaaaacagatccatctaatgtaggtgaacctcattttgatagatgctataagtcttttaatcgtgaagagtggaatcaaattaaaagaaaggcccaagaaagtagtattactccagctgcagtactttgtacagcatatgcacaagttctcggatattggagtaatcaggatagagtagcaattaactcaacagtatttaatagatatccattccatgaagatgtaaataggattattggagactttacatcggttatgcttctaggcatagacttaaagataggatcaactttttgggaaaaagcaaaatatgttcaagatgtatttgctgaagcattagaacatagacattatgatggcatagagttcatacgagatctgactaaatatcataaccttggaaacaaggcagtaatgcctattgtatttactagtatgttattcgggaattcagtagatgtagcagaaagtggaactaatgcttttggaaatgtaaaaatgtcagtaagccagacatctcaggtatttattgatcaacagataattgaagttgatggcggtgtgaccattacttgggattatgtagagcagttgtttgataaagaaatgatgaacaatatgtttgagcaatatattggaattctagaggaagtttcttcaagaaatgaaaactattgtttaactataaaggaaaaagatcaaaagttattagatgaatataattctacaagtgaagcaataccagaaaagacacttcatggaatgtttgtggaacaagcagcagaaaatggagagagtatagcagtaatttatgaagatgaaaccataacttatgaagaacttgataagaaatcaaatcaaatagctaaataccttaatgagcaaggagtaataagaggggactatgtaggtgtattggcatatcgaaagatagaaaccattgtgaatattttaggagtcctaaaagcaggagcagcttatataccgcttaatcctgatcatccagaagaaagaaggaactatatattagagaatgccagtgctagaatgcagttattacctgaaacatacgtagaaaaggaaatatctaaatatgacatcaaaaaattgaagaataacatttatccagatgacatagcttacgttatttatacttcaggaagtacaggaaaaccaaagggagttatggttaaacataaagcagctgccaatactatcattgatattaataacaagtttaatgttaatgaagaagatagaatcattggtttatcatcaatgtgttttgatttatcggtatatgatatctttggagcattatcaagtggagcagcccttgtaatgattaatgatcagagagatataaaaaacattaatgatgtaatcaaaaaacatgatatcagtatttggaattcggttccagcaattatggatatgctgctagataatattggaatagattatggaacagaggttgattaccgtcaatcttcttatggaaatgaagtagcagtagattatagtagctacagtgataatgatagtctgagattagtactattaagtggtgattggattcctctaacactaccagaaaagatacagaataaattctcaaatgcagaagttatcagtctaggaggagcaacggaagcatctatatggtctatatactatcctgttgaagaagtacaaatggattggaagagcatcccatatggaatccctttagcaaatcaaaaattctatgtgctaaattacaataaagacatatgtcctgtagaagtcataggagagctttatattggtggagacggtcttgcagaaggttacatgaacgatgaggaaaaaacaaataatgcatttattaatcatcctgaccttggaagattgtataacacaggagactatggagtattgcatagagaaggatatattgaattctttggccgtaaagatcaacagataaagatcaggggttatagagtagaacttggagaaatccaaagtggtattttagagtataaaggaattaaaaatgcagtggtagtggacaaaacccatgaaaatggaaggaaatatctttgtgcatacattgtaggggaaaaagaagtatctataactggcgtgagagaataccttgaagaactgcttcctgattatatggtaccttcatattttgtaatggttgatgagataccacttactgccaatggaaaggtagataggaaagcattacctgaaccagacggaaatgttgaattaggaacagcatatgctgcacctactaatgaaatggaaaataaattagcagtaatatggcaaagtttattaggtcttgaccaggttggaattaatgatggtttctttgagctaggtggtaattctgtaatgatggtacagatgataactaaaattgatagagaaattggagttgaaatcaattttagagagtttttggagaagaacacaattgccaagttagcaggattaatttcaagcagatatacttcaaacggaagtgcttcaagtacagtaaagattgtatatccagagatagttccagataaagaaaaaatgtatgaaccattcccattaacaggtatacagatggcatatttaatgggaagagacgataaatttgaactaggtggagtatcaacccacgtatatacagaatatgaaacaaagttagaggaagaaagatttaataatagtataaataagattatatctagacatccaatgatgcgtgcagtaattctttcaaatgggcagcagaagatacttgataaagttccagaatataagatggaagttgttgatttacgccagcttgacagtaaagatcaggaaaaatatatattgaaagaaagaaaacaaaaatcccatcatgtattcaaaactgatgaatggcctctattcgagtttaaaatgttaaaactaacagatgagacaaactacttgttctttggtttagatatgttaatagctgatggggcaagtatattgatgattattcatgagattatgaaatattatgatgacccaaaattaaatttaccagaaataaattgtacattcagagattatatgcttgcttataatgattttaaaaatggtgaggtttataaaaaggatagggaatactggttacagcagcttgatagttttccacaggcacctgtacttccatataaaacagatccatcaaatataggtcagccacattttgaccgatgttataaggcttttaatagtaaccagtggaataaaataaaaggaaaagtacaggaaaatggtattacacctgcagcagcattgtgtacagcatatgcagaagtccttggatattggagtaatcaggatagggtagcaatcaattcaacaatattcaataggtatccattccatggagaagtaaatagtattattggagattttacctctgttatgcttttaggaatagatttaaagataggagcaactttttttgaaaaagcgaaatatgttcagaatgtatttgctgaagcattagaacatcgtcattatgatggggtggaatttatcggagaactgtctaaatatcataatattggaaacaaggcagctatgccaattgtatttactagtatgttgtttggaaatacagtagatataggagaaagtgcgactaatacttttggagatgtaaaaatgtctgtaagccaaacatcgcaagtatttattgatcagcagataattgaagttgatggtggaatcagcattacttgggattatgttgagcagttgtttgaaaaagacttaatagaaaacatgtttgaacagtatataggaatacttgaaagtattatagaagagaaagaatacagattagaagcaaaatcatcagatttagaagttataaacgagtataatgcaacagaacaagaaataggtaaagaaactttacatggattgtttattaagcaggcagagaaaactccaaataatatagctgtaatgtttgaagagaatacacttacttataaggaattagatgaaaaatcaaataaagtagcaaatttccttaaggagaagaatataggaagaaatgattatgtaggtgtaattgctgagagatgtatagaaagcatagtaaatattcttggtgtattaaaagcaggagcagcatatgttccaattaatccagaacatccagaagatagaagaaaatatatactagagaatagtaattgtaaaatggaattattaccagattcctacaaaaaagataatatagcaagctacagcaatgaaagagtttatacaaaagagtatcctgaagatatggcatatgtaatatatacatctggaagtacaggaaaacctaagggagtaattattacacataaagcagcagctaatacaataatagatataaatcagaagtttgatgtaaatgaagaggataaaataataggattatcatctatgtgctttgatctttctgtatatgatatatttggtgctttatcaagtggagcagctcttgtaatgatagaggatcaaagagatgtaaaaaatattcagaaggtaatagataacaatggtattactatatggaattctgtacctgctattatggatatgcttatagataatatgtcagaagacggggatagcgatgaagtagactattggaatagtcataacagcggaaacttagtagaatataatgctaatgaaagtttaagggtagtgctgttgagtggagactggataccactaacattgccagaaaaaataaaggataagtttgcagatgccgaagttgtaagtcttggaggagcaacagaagcctctatatggtccatatattatcctatagatgaggtcaatgaagagtggaatagtatcccatacggaatgcctttagcaaatcaaaagttctatgtattaaattatgaaaaagaagtatgtcctataggaatagctggagaactttatattggcggagaaggtcttgccgaaggttatatgaatgatgaggaaaaaacaaataatgcatttattaatcatcctgaccttggaagattgtataacacaggcgattatggagtaatgagtagggaaggatatatagaatttttaggaagaaaagaccatcaaataaaaataagaggatatagagtagaacttggagagatagaaaataggatattagaacaccaatctataaagaatgtggtggttattgatagaagtcactcaaatggaagaaaatatttatgtgcatatgtagtatcagatgtagatatatcagtaggggaactcagagaacatcttggaaagactgtccctgattacatgataccatcatactttgtcatattagataagataccattaactgcaaatggtaaggtagatagaaaggcactgccagaaccagaagtagattctttagaaacaggagtagagtatgttgcaccaaacagtggaattgagactaaattagcagaaatatggcaaaatttattaaatgctgagcaagttggtataaatgataacttctttgagttaggcggaaattctgttctattggttaaaatgcataaacagcttgaacaagaacatcctaataaaataaaaattgtagatgtattttctcatccaacaatagctaaattagctcaattacttgaaaaaattgaggaaaagaaaagagatttaccaatttaccctctacaaatgccagttgaatttttcacagttgatagtggtttagaggatcaattctatcaattatcaattgaaggccgcctctttgaaaaattagagctgatatcaaaaaatgaacatgtaagtaaatatgatattttatttgcattatatagcaatttaattgctcagataactgaaaataatcaaatagagattcaaacattatttagagagaactttgtgtattcacttggtttatccttagaaaaagtagatgatttttcagaacttctaaaaatcattaaagaaaagatgtcacaaattgaaccaaaaaggttgtttgaagtaaaagatttgaattcgtaccagggtaaaaaacaagctatgtcgtcagcattgttacttttttatgataatagtctgcttacagaacaaattaacttagttgatttttatgatttgattttagaagttgaagagaatgagtccaacatgataattagttgttcttataataatttcaaaattaattctaaaaaagttggagaattagtatctcagtataatcagataattgaactgcttgtagaaaattattagacatataatttgttagggaatcaaaaaaatctactagatatttacttgctatatattaatccagaaattttaagttatttagtcttccataaataagatagactaaaaatatacatggtgcatattagatttatgtgatgaaattctaatatgcattatgctaagaagaaatccaaaactaatggtgtaaatattagttgaataaataattgcaaaatgctgtaatatattatcaaaaaatccaataaggagtggaacaaatgaatttagatatactgacattaaagagtaataaagcagatgatagaactcagattgaaagcatatcatcaaaggatattgctattattggcattgcaggaaagtggccattagcaaacaatgtagaggaatactgggaaaatataaaaaatggtaaagattgtattcaaaactttccatatagcagaaaaaaagatattgaacctttttgtgaaaagaataaagagtattttgaatgtggatttcttaatgaaattgataaatttgattattcattttttcatatatcaccaaaagatgctaatttaatggatccacatcatcgattatttcttgaatcagcatatgaagcaatagaagatgcaggttatggtggtaaaaaaatcataggcactaatacaggtgtgtttgtaggaatgagtgacttaggtgatattcaatatatagatttaattaataaatcagaaccagagtttttagttcaagctctttcatccaatactaaagctatattacctagcagggtttcatatacttttgatttgcatggacccagtatgcttattgatacagcttgttcatcttcattagtagcactttcaactgcctgcaagtcattaagagaaaatgaatgtgagatggcactcgttggaggtgcaaaggcttatcttctaccattaaaagagcgtccaatgttaggaatcgaatcatctgatgctagaactagagcatttgacgaaagttcagatggtactggagttggcgaaggtacaatggcagttttattaaagcctctccataaagcattaaaagatagggatcatatttatggtgttattaaaggcatagccataaatcaagatggaagatccataggaatttcagctcctaatcctgttgcacaagcagacgtcatagaaaaagcttggaaagatgctcgtattgatcctactacaataaactatatcgaggctcatggtactggcacaaaactaggagatcctattgaaatagatggtttgactaaagcttttagtaagtatacagatttaaaaagtttttgtgctataagtacagtgaaaagcaatattggacatctttatgatttatcaggtttatcttcactcataaaagttataatggagtttaaatataaagaactggcaccgagcattcacttcaatgttcctaatcaaagaattgattttgaaaggtctccagtttatgtcaatgataagttaagaaagtgggaggcagttgattcagttagacgttgtggtataagttcatttggatttagtggtacaaactgccatgttgtattggaagaagctcctaaaacagttaattctatttgtccagctaagtcaacagaggttcttgcagtgtcagctaagagtcaagaagttctcatagaactattgaaaagttatctgggttatcttgaaaaagataaaactattaattttcatgatttctgttacaccgcaaatactggtagaggacagtatgaatgtagggtggtatttttgccaaaagaccaagcagaattgatagacttacttaaaaattgtattaaaaagcaaccattagatgatgagcaaactaaaaaattgaaaaaaatcttttttggaagctacaaccttttgagtggaaaaaatgtatctaaatctggaaactatatttctaataatgagaaactgcaatttagtgaagaagctaattcaaaattgaaatactataacacagttaaaaaagaggatatttcaattcttcaatcagtatgtgatctgtacataaagggaggagatgttaattgggatgagctatatagaggtgagaaaaggagccgagttagtatacctgtatatcctttaaaaagagaacgatgctggttagatatgccaaataaaaagtacaatgttggaatgtctaatattaatggactattagaagttgaaaatttgcctgatgaagctcgaaagaaaatagcaatgattcttaaagaatatgaaattaatgaaaaacaagatgaatctatagatgaacatttaaaagtagtattggcagggcgagaggatggaatgtacactgaaacagaaaagatacttgctaaaatttggtacaaagtgttgggtgctaataaaattaacatatttgatgattatttggagttaggaggtgactctatctcaggtgcgaagattgttaatctagtgaattctaagatgaataaaaatatagctattactaatctaatggaaaatagatcaattatagattttgcacaatatatagatagcgaattatcagagtcaagtttgcctgatatactaccaattgaggaaaaacaatattttccagtttcttcatcgcaaaagaggatatttattactagcttaatgagtaaaaatgtttataatgtacctggagttctaattttagaaggaaaaattgacttcaataaatttaaggacacattaaaaagagtagcagatcgccatgaaattttgagaactactttcgattataaagagaagaaaattgtacaattagttcatgaagaagctgttatttcactggaatggcatgaagtaaaagagaataatattgatgaaattataaaaagctttattaagccatttgatttaaaacaacttcctttatttcgttttcatattttgaaagtggatgagcaacgccattacctattttacgattttcatcatattattacggatgggacttcacatggtgtatttttaaatgattttattcatttatactctaatctgcctttaccggaaataaccattcaatataaagattatgcattttggcaaaataaaatacttaatgaaaaccacttaaagaaacaagaaaaattttggttgaagagattttcaaagcagaatacactacttcagcttcattatgattataccagaccagatatcagaagctataaaggaaaaaatagcttttttacgattaacaaggatttaaaaagcagattaaagcagtttgcatatgaaaataactgtactttgtttgttcctttattaagtgcatatagtattttgttatccaaaaattcaggtcaggataagatagtaataggaaccccagtagcaggtagacaaaataaaaaattggaaaacttagtaggagtattcattaatagtgtagctattgttacgaaaccaaaagcagggtatttgctggctgattttgttaaaaaaataaacaaagaagttttgaaagtctttaaaaatcaggagtatccatttgatatacttgtagagaaacttggttggcacaataacccaagtaggaatccattattcgatactatgtttcagtatcagaatatggtaatgcctaaaatgaattgtacagaagtaaaagtagatagatatgagattgaaaatgaaattgctctatttgatttgactttagaaataatagagcatgattctgttttgaattgtcgttttaagtattgtagagatcttttcaaaagcgaaacaattgatagatggagagaagaatatcttgaaattttaaattatattgttgaaaataaagaactgaaattagaacaattagtttctgataaacatgatgattcaataggagatttgaagttagactgtgtagaatttaattttgattaacatatatagcaaaaataaaactacattcacatagtttatatattaaacaaataactaaagaaaaatgtagaaatgtaactgcaacatatataaataaaagagtaataaaattttaaaagatggaggctgtaaaaatgtctaaaattgaagtgaattgtaataaatcaataaataagtttgttggctttaagagttttgtaaatgaatcaaataagccctctatgctgactgagagaaagtgcatagccaaaagcataccaatatcagtttcagaaatgataagaaaaatagctaataggtctcagttaggtatttatatgattttgctttctggggtagagttcttggcatataaatattcagatttaactgatggaattttgggaatgcctgtaaatggaaaaaatttttctaatatatctgaaaatagaatggtaccaattagatataaattagatacacattggacatataaggatatgctaactaatgtgaaaaaaacagtaagtgaaaatcttgaatgccagactaagaatagcatacaagatgaattttcatattgtaaaacaattatagttttagagaatattcatcaagtatctgaggaagatttaaagggaattgatactgtttttagttttaaggcagaggaaaatgaaatcttaattaaattagaatatatagatggattaaatatagaattagcagaaaatttgttaaatcaatatattaacttcttaacaattgtaacaaatcaacctaatatttgtatatctaagattgatttaggtacaaaatcagaaagttgggttttggatgaaaaaaatacaatagacagctatgtagaacctagaactgaagtggaatggactattgcgagagtttggggtgatatcctaggtattgagaaagttggtgtagaggataatttatttgagttaggagcaagttcttatactatagtacaaatcgcaatggaattaagttctgacttcatttttgatatcaatgatatttttgagtttcctactattagcagtttggcaaatagagttaagtataaaaaagataactggaaaactttgatgaaacaaaataaagaactagcttatacagcaagacaaaataaagagtccaagtatgttttagaaaatgatatggaaatttataaaaataatgtcttaaaatatgaagatgttgatgtagaaacaaaaaacaactatcagcatattttattgactggtgcaactggttttttaggcattcacttgctacatgatttactaactaattcacaatatgaactatacctgttagtaagaggtaatacaaagagtgatgctgaaaaacgacttgaggaactttataaatattattttggaaatggatttaattcagttaaagaaagagttcatattattaatggtgatctagcaaaggataattttggtgtatcaaaggaagaatacaataaattgtctgatacaattgactgtattattaattctgctgctaatatcaagcattatggtcttgcagaagatttctatagtattaatacagatggagtgaaaaggctaattgagttttcgctaaaaggcaacaaaaaagatattcatcagatttcaacgggtggtgtagctgctttagcagaacgtacagattattatttatttacagaatacgttgacgaattggaatgtaaactgaataatatttatttaaaaagtaaatatgaagcagagcgtttaattattcaagctagagagaaaggaatcaatggaaatatatatagagtaggagaaatattttataataaaaggactaaaaaatgtcaaaaaaaatatgaagaaattggtatatacagactcattaagtctttcattcaattaggagtaatcccaaatgataaaaataagtatatggacttttcgtttgttgattatgtgagtgaggcgattacacttatttttgacaaaaaaaatattttaaatgagacctttcatctctataattccaattatatttgtctagatgaattaggtgatttcttggttgaagaaggtattaatttaaataggttggaatttagtacgttttatgaaacattatttcaagagaatggtgatatagaaataaacaatgacttactagctattttattattcctacatccttcaagaatgttgactttgcttcagtgcggaaagacgacaaaaattctagaaaaatttaattttaaatggcctgtagttcagcaagatgatattcatacaatgatggaaatatttaaacagattgaatttatttagtaataaaagtatatttggagttatttttaaatcacaattacatcagttcatagttttcagtgagaagctaataattgataatataaaaaggagattaaaatgtatgaaatattttagcattccagcagattttattaacgacacaattgacaaatataatgaattaaataatatatatgaggattcaaaattaattgaaacatacggtcagttaactgattttggagaattcaataaaattggatcaggaagatcattaagaattttaccacaagtggatatgaaggaacttgagaaatatgtaaagtattccttggataaaaaaataaaatttaattatacattaaattcatcatgcatgggtaataacgaattgtcaaagagtggaatgaaccaattatataattttttaaaagaattgtctaatattggtgtaacatcacttacagtagcaatgccttctgttatcgaactaataaatacatttggatttgattttaaaataaaaacatcagcaatatgtcaagtttcttctgcaaataaagctttattttacaagaaacttggagttgagagagtagtaatagatgaagatatttcaagaaaatttgatagtattaaagaaatttcttctgtatttggtgatggtgtagaagttattgttaatagtttatgtatgaaaaattgtgcatataaaatgtttcattacaatcatgaatcacataatcatgaagaaatatccaataaagcatcaggatattattacaacagatgcatctatcaaatttctaaggacataagaaatccacttaaacttaattggattaggccagaggatttaaaacattatacaaatataggagtaaattattttaaaattcaaggtagacaatctgttcataaaggaaatccagttgaaactttaaaatgttattttgaagaaaactataatggaaatttaattgatttatttacattatttagaaaagataataattatgaaagtaatttaccttatattgataataaaagtttaaatggatttttggaaccgttcttaaataagaatttttgtaaggagaattgttcttcttgtgattattgtcttaaatacgctgaaaaagctattaatatagcacaggctgaggatttaaatagacaaatacaagagcatcataaaataagtgatagttatattaatatgttaaaggaagtatattaatagcatttgggttaatataattttttaatttgaatatatgaaagggatgaacatttaatggaacagacattaatttcagtagtaatgaaacatacaattcggtttccgtctaaaatagcacttatagtaaataataaaaaaataacttatggagagctagggcagagtattttaaatgctgcacagataatgagagaatatggagtttgtccaggaagtagagttattttatcagcgacaccttcacctgcatttgttttcggttattttgctactcatattttaggggcaattgcaatacctgttgatcctcaaataagcgataaaaacttgaacatgattattgaagaaactaatgcaaagcaattgttcctagctaaaggaaaaactgctagttcaatttcaatagaggaactaatgttaccagctatatataatgataaggaattcaatgtcataccagttggagaagatgtggcagatatactttttaccactggaactaccagcagatcaaagggagttgttttaacacataagggaatattatcagcagctcaaaatattaatcaatttattggtaataccgcagatgatagggagatagtgcctctgccattgagtcattcatttggattaggtcgcttacgttgtaatatgcttgtaggtggaactattattatgtgtgaaagtgtcgctaatataaaaaatatatttgataatatgaaaatatggaaagctactggttttgtttctgttccagctggatttgcacttctacttaagttgagtggaaataagttaggagaatatgcacatcaactaaaatttatcgagattggtagtgcgccaatggagatgaagatgaaacaaagattaatggaactcctaccaaatactagaatatgcatgcattatggtctgacagaagcgtcgcgctcatgctttattgaatttcacagagataaagagaaattgacatcagttggaaaggcagcaccaaatgtaaaagtaaaaattatggatgagaataaaaacgatctttcttctggaagtgaaggctcaatctttgtttcaggagaccatgttatgaagcaatatttaaataagccagaattgactagtcatatactaaatgatgggtggttagatacaggtgattatggaaaacttgatgatgaaggctatttataccttaagggacgtaagaaagaaatcattaatgtcggagggagaaaagtcagccctgatgaaattgaagaatatttgaacgaaattgattatataaaagaaagtgcttgcgttggcgtttctgatccattaggtatttcaggagaaattattaaggctttcattgtattagatgagaagaaagtaaatgctttttccaagacacaaataatagcttacttaagaaatagagttgaaccatataaaattcctacacagtttgaggttattgaaaaaatacctcgtacatcttctggaaagatgcagcgtcagttgcttaaagtctaagaaagttagtgtccacgaggctaacttacattgtattcaatggggggagaatatataacttaaaaaataattttgtactaatgttatatttgtaattagagttatcctttaaaagcaaaattttaggttattcggctttatacctgataaaggataaactcttcatctattggtgtcgctgaggttatattaatgtatttattatggatattaaactaatctttacgaaagcaagagctatttattatatatcttggagattatagtgattaaaacaatatgaagtggaggaaagcaatggaatatagaactgaagaattgtatggtgatttttatgaaaatgatgaaaaacccttagtaatagtaattggaagcgtccaaccaggtatacctattatttcaaaagaacttttggaatatttaaaatccaagtttaatgtattattattagcatattttggggttggagatttgccaaagaggttagaaagaattccgttagaatatttcataaaagctattaaccattttaagaataagttaaatttaaatgatgaggatatagttttgatgggtagtaataaaggtggtgaacttgttttactactaatttcaaaatatattaatcctagcgtagctattgcctgcgtaccaagctgttatgtatggcaagcaattcctaaggggattatgaacattttaatcccaaaatcaagctggacttttaagaataaagacattccatttgtaaggtttaggtataaccgagaagtaattaatgatattaaaaataagaagtacaattcttctcatttattttctattcagacgaataaaaataagaatgctttgattaaagtggatcaatataaaggacgcttacttttgatttcaacagaaaaagaccattactggcctagtaaagggatgtgtgaattcattgaaaagagcaggaaaggctatactaaacatattgtctttaactgtgatggagatcaacttttgaaatataaagagccaagtatggaaataatggatttcttagaattataaataagtaagagctagacaattcgcttgtgagagtattttcaaaaacattaaaatgtataaaatactgaaatcaaaatgaagaaaaattctaaagtagatataatataattttgactaattgagatgtataaaaatgataaatttaaatatttcttaagtaaaatgcactaagtaattaatgaaagagtggctgagcaatgatcagtaactaaagaggattaaatatgttttcaatttactgtgtaagtataaaaaattttaaggaagaagataagttagtttatcttctcagatatatatctaaagaaaaagctgataagttaatgaaattcagaaaaatagatgataggaaaagaggtttgatatctgaaatattagctagatattttatatgcgatatgttgaaagtaaaaaatagtgaaattattttaagtacaaataaatacgggaagccctttgtgaaaaattatagccaaattgaatataatatatcacattctaatgagttcatagtttgtgccattgggaatcaaccagtggggattgatattgaacaaatatcaaatattgatttgatattaagtaaaaaggtttttagcgtacaagaatatgaagcattccggaaaataggtaactcaaaaaagcgtgaatacttctatttattatggacgttaaaggaaagttttattaaagcaaagggctttggattgtacatgccattaaattcgtttaatataaacatagttaacgaaaacaatatatattgtttatatgaggataataagtattattttaaagaatataaacttgatccatgttataagctatcagtttgttctaataaaaaagaatttccaaaacgaattgaaatttttgattttgaagagttctataatttagtagattgtaatttagttcagtagcaactactgaaaattattaaatgatgaagtttatttgagtataaaaatgtttattattagatactttgaagcaaaattggcacagactacatgcagggcatatatctaataattaatttacatatatgtatgactgattattttaatagaaaaatatactagaatgaggtgcaaagaatgagagattatgcaattttattacctggacaaggatcacaatatatcggtatgggaaaggaattatatgatggctatgggatagttcggaaaatttatgatgatgcaaatgaaatattaaactttaatattagagatttatgctttaatggaaatattgaagaactgtcaaatactgaaaatgcgcaaccagctattttattagcaggagtagccgcatttaaagtgtttatggaagaaatgaaaaaaaagcccaaatttatatgtgggcatagcattggtgaaataacagcattaacatgttcaggtgcaataaaattagaaaatgcaataaagattgttaaaaaaagaggtgagttaatgggaatggcatcttacaataaaaaaggaattatggccgcaattattggatcaaatcttgaaaaaatacaagctatatgtaagacaacaactgatgagaatgattatgtgggaatagcaaactttaattcatatgatcaaatagtcatatctggttatgaaaaatctgttaaaagtgttatttctaaactaaatgagatgaatgaagacggaataattttaaatgttaagggagcttttcacagtccattaatggaacctgtagtagaagaatttaaagaagaactagaaaaatatgaatttaatgatattgatataaacgtaatttcaaatgtagatgcattaccatatatagataaaaatgaaataaaacaaaagttagttaatcaaatagttaatccagtaaaatggatacaaacaatggaatatttgaaaagaaacggagttgattgtgctgttgatctagggcctaaaagtattgttaaaaatttactaaaaaagagtgagttaaatataaaatcttatgcttttgaaggaggaaaagatgaggctatagagtatctaacaagaggtgaaaagaaaaatcataatagtgtaaatgattatatgaacactatagtaaccaagtgtatagcaatagcagtttgtacccaaaataaaaacttgaatgatgctgaatacgaagacggagtggttaagccatatagaaaaatgaaagaaatgcaaggaaatatagaaaaagaaaatagaaagcctagtaaagaagaatgcttggaatcgatgaatttgttaaaaaatatatttgaaacaaaaaagacaccaatagaagagcaaacagatagatttagcgagattcttcaagtgacaagtaataaagattttaacgtatcaataaatgaaattaattaatatgaattgtatagtgagaatgactctattaagaaattatagtaaatagcaagggaataggaatactaaaatcagtatgagagaagctttgagcctgtcaagattttcgtgtaaatttcaaaagtaatatacttattttataaggttggagggagaacaagacttccttccattttattttttaaataaagcttcatcgagtaaattttcgaaacagattgaaagttaaaccaaaatttagctgaaatttcaaatctttagacttatttctttgtgatgtaaagtatctttaacaatgattcatcgttagaaaaaatcgatttactttggggaactttattaagtgagatgattataggtttttggtgtatttgttatttgtattattttccttattttgggtgattatttgaaaatgatgattgcttttcctaattatttttcggtgttagagaatactgctctaacaatagtttatttaaaacaattaacgccatcaaaatcacgatttttaagttcatttagaattaataactaatatttttttgttgtatttgaaatacgagttgcgaaacatcaatcatatagatatctttaatttatgcttttatatctattgaggtcatgccttttgaatacattcctataaaagcattttctaatgatgatatatctttctgatatttctttacttcaccggattaaatgagaccttgtagtctaacggaacatctaaatcaaatagttcacaattaaattttatgttttttatactcttatcatttctgcgattatatatattgcaattagttttctgcattaaatatttaaatttttgcttaacatattaactacctgaatgtagtcttatttttgcaacatatatatttgtattttaatactcagagcttaactaaactagtaagtggtagtcctttaatactaattatgttgtatatgctcatttaaacaaaaacttatagacagcctcaaccgtagcttcaatcaatcgttcacgacttataattgtttcttcaaaggcaatatggtcgacagtagatgaaataatattataagaaataattgatgcaacataaagatcacttatcttaatgtcgttcttgcacatatgtaagtattcgagaataacttttataattatttcatgatgttttttatttatttcagctatttctggcatagaataagataaaatctttatttctttgttcaattgctttgaggattcgtgaatgtttaggattttattaataagcttttgtagccatttctttttatctgatttatataggttaatagctagctcagattcattatttatttctagaaaaagtttgttgtagtcatctagtatcttcataaaaatagtgtccttatctttataataagaataaaaactacctattgaaacgccagctattttagcgatttcatttgtagtggtcttgtaataacctttttcacagaataacttaaacgctgttttaataattttttcatttgtaataatacttcttttttgtttaggtattcgaattgctttatttagttccatgtaatcatctccttaacttcattttaagtttttatatatagtctgtcaataaaatgtgaatatttactcatattttattgactttatattccgaaagttttatgatagaaatatgagtaaagactcacatttgaaaatgaaagaaggaatattatgtcaaaaatagaaagtaacaaaatggcattcacactattagcattagcaataggcacttttatgtctgccttagatagcagcgttgtcagcattgttattccagttatacaaaaatattttaatgtaaatattgcatttgtggaatgggttattacagcttatctgcttgtagtaagtagcgtattattaacttttgggaagctatcagacttatatggacacaagaagatttacctaatgggattcactgcatttacattaggttcgtttctttgtggaatttctttaaatatccagatgttgattgtgttccgtatatttcaagcactaggtgcaggaatgatgttttctactagttcagctataattactgctagtgtaccttccaataaacgtggtaaatctttcggaattattgccatagctatctctgcagcgtgttgtgctggtcctgttataggaggaattcttgcaagtatgatggggtggcagtctatattttacatcaatatacctataggtatattgggtatttatctttcatacagatatattccagaggataaaaaaaagatatctgtgccttttgatttaggtggagctgtattgatatttattactttgtttttgattcttctaccactagatctttctggtagtgaaagtattagtactaccatgtttataattttaattgtattgggtattgctttgggggttctatttattgtatatgaaggaaaaacaaattatcctctactaaatctcaatctgtttaaaaataaaactttttcagctggccttattgctactactttcaactatatggctcaatttatcatggcgttccttgtacctttgtatttccaaaatactttacagctttctcctatgatgacaggtgtactttttctcccaatgccggtttcctccatattgattgcacctatcagtggtagtttttcagacaaacatgatagccgtataatgagttcgactggaatgggaatattggctatcgcattgtttatgcttagctttcttaatatgggcacatcatcttggtatatagtaattgccatgattctttctggggtaggttcaggattgtttcagtctccgaataacagtgcagtaatgggaagtgtaccagcacaacacaggggggtggcatcaggcactctttcgactatgcgaaatctcggtatggtaatgggagtagcagtaagtggagctttatttagttatagtactaactatgccaatagtatttattcaactcaaggtcttaatggagtgaatctgtctcaggcagtatccacatatgggctacgtataacatttacagcagctgcaattattgctttagctgctatggtggcttcacttataaaaggaaaaactacaacagtagcagaagcaaaatcaaacattccaagtaataattgaatactattaggggataaaataattaaaatttattgtgaattcaaagaagatacattattacatgaaaaagagtctattagaaaaatacaaatggctattaatcttagactaaaactatctaaaacacaaaataaatcatatataatggtctaactgttatagatataagaaaattatttataattagcaaattaatttcatcatattggtgaactaaaaacaatatttactaaattatatgatctatataagctgcattaaaaaggttacaattcaaatggacaattgcatttatatggctaattattatgtaatgttattattgcaacttatatagatataacgggagtaattatattaaataggtaaggagaataaggaatgaaaaaactacttataaataaatcaattataaacaagcctgatgataattataatgatctgaatagttctagcaaaaaaagattttcaattaagactaataagaaattaatagttatattagtagtcttaatagctatgggaataggaactaaaatagctattactttactagctgatcagggattagaaaaaagcaagtatactgttcttcaggcaggaggaaatataacaaaagttaattataagggtgaagtaaaaagtgaaaattctactaatgtttattcaaatttatctattccaattaaagaagttaaggtggaacttggtgataaggtcaaggctaatgatgttttagcggttttagatacaaacaaactagaaaagcaaataaatgaattagaagcaactatttctacagctgatgcaagtaataaagtagaacttgctaatgcagaatcagaatataacactgcactaactcaaagtaatgatgaaaacaatggagatattaaaaatgcagaagtagctttagaaggagctaaattagaccttgaaaataaaaagaaaatttatgagaataacaaattattatttgagaatggtgccatttctaagcaagatatggacacatatgaaatttcttataaaaatgctcaaaatacttttgataattgtactgtatcattgaagaatataaaaactaaagtgcagcaaaatttaactacagctaaaaataagtatgatgaagcaagagtaaaagctgaagataagagtcaacatgtttcaattgaaaatttaaaaaatgatttaaaagatgctgtaattatagcaccagttgatggaataattactgcaaaaaatgcaagcgtaggaaatccaagtacaggagcattgtttgaaattaaggacgaagataatacaactgtacgtttagatgttaaagaagtggatattgagaaaattaaagtagggcaaaaagctgaagtaaagactgattctacaggtgcagatattattaatggagaagtagtaagtattcagccaatagctgaagctgaagataaaagttcattaactcttaataatgattctaatgatgaagaagcaaaatttgaagttaagattaagataactgatacaaattataaattaaaaataggtatgaaagctcaagcagatattattgtagatgaaaaagacggaacttatacagtaccaattgaaagcataataaaagataaagataataatgattgtatatatatagcagagaagcaagaaaaagattatgttgttaaacagattcgtataactaaaggggctgaaacagatattaatgctgaaatttcaggaaaagatattaaagatggtttgattgttcttaattctccttcagattatgagattggaagcataattaagattaatggaagataggagagaaaataatgtttttagaagttagagatgcgaaaaaggcatatggacaaggtgacattaaggtgcaggtactaaacggggtgaactttaacttagaagaaaagaagatatgcaccattttaggaccctctggatctggtaaatcaaccatattaaacgttattggtggattggaaagtatagattcaggtgatgtaactgttgatggtattacaacttcaagtttaaattccaaggatttagcattttatagaagagataaattaggatttatatttcaattttataatcttgttcctaaccttactgttaaagagaatatagaagtatgtgagtatcttaccaagaccccattagatatagaagaattattaaaaacactgggattatgtgaacatcaagataaatttccaaggcagttgtcaggaggacagcagcagagaactgctatagctagagcacttattaagaatcctaagttattactttgtgatgagcctacaggtgcactagattataaaacatctaaagaaattcttgaacttctagaatctgttaacagaaaatatggtacaactatgataatagttacccataatgatgctataaaatatatgtcccataaagtagtaaaagttagagatggaataattgaggatgaatatgaaaatgaagcgataatggaagcaaaggatattacttggtagtagataaaagtaactgatatttagtgagaggagtgaataaatggtattaaataaaagaatactaagagaattcgttggaaatgtaagtaagtattcagggttaaccatattgattttaataagttctatgttaatagtaggcttttcaaattcagtagattgtatcatgtcaacttgtcaaaatgctgcactccaaaataatcttgaagatggagaattttatgttaaaagtgaattaagtgatatgacattagaaaagataaaaagcttaggagtcgatattgaagaaaatttttacgtagattataagctttttgaaaatcaaactattagaatatttaaggatagaaaaaatataaataaaatatcaataaaaaaaggtaataacttaaatgggtctaatcaaatagttatagatgaacactttggtgaagctaatgattataagatattgaataatttaattattgaaaagaaaaactttaaagtagttggatatgcaacagcatcagattacactcgtattattaagaagactagtgatctaacaccaactccaaagaattttggtattggttttatgaatgaagaagattttaaaaatttaagggataaatcctattcatatgtatttaaactaaatggggttccagttgataaggttaaaaacattgtatctaacaattcgactgtaacagaatttattaaaatatcggataattcaagggctataggatacatagatgatattaaagtgaataaaaacatgtcaatattaatgggatttgttatatgtataatgatagcttatatgatatccatgatgattattaatacaatagatgaagagagtgcaataattggagcattatattcattaggatatgtaaagaaagagatagtaaaacactttatgattttgccaacaataattgttagtataggggcaattataggaacatccttagggtttgtgataaaagatctattagagaaagcaactactaatacttattcaatgcctaatattacaagaatatacccaccgtatttgatttttataggtgttattattcctatattaatagtaataatagtaaattactttataatctctaaaaaacttaatagtacacctcttcaattattgagaaaagaaaagaaagcaagtaaattaaataatgttaagataaatcattttagttttataactaagtttagattaagagaatttttaagagaaattagaggaaatattattttgttttgtggaattttttttgcaacttttggacttgcttttggagtctgcatatatcgtactggtgatgattatgtaaaaattattcaagaccaaataaattataattatatgtatattttaaatcgtccaattgaagttactgaaaataaaggacttgagaaaattacgtctaaaggattatcaatatattctaaagatatagagatggatatggatgtaattcttcaaggaattaatgaacattctaatttttattcttttagtattccagaaaatgattctggtttatatatatcagatagtgtacaaggtaaatttaatttaaatgtgggagatattattactttaaaagataaaggtgaaaataaaatatttaatttaaaaattaaaggtgttgtaaaatacaaatctggtctcaatgtgtttatgaatagaagtcagttaaatcgtctgttaaaagaggataaatattattttaatggatatttatctaaaaataaacttgatattaatgatgattatgtaaattcagaagtaacatataaaaatacaattaaatcagcacaagataacacatataatatgtacccaacaattgcatttattgtaatatcttcaagcgcaatactaataataagtatgtatttattattaaaagcaatggttgacaagagcatttcaagtatctctttagttaaaatttttggatttaatcaaaaagagataaataaattgtatcttggaagcttactatatactgtgctattttccatagttatttcaatacccatatctgtaaaaattataaaattaatgtatcctggaatgacagctgatgttcaagcgtattattcgattagtttagaacctaaagattattgtcttgtagtgataatggtaatggttggttattttataagtgatgtattacttaagagacatattaaaacaatatcgttaagtgaggcacttaaaaatagagattagtagacattgtctaaagtgtattatttgatattgatgttatttcaaatatattagactatgaaattttaaagaaggaatacaaaatttaattttagataatttctttagctataaaatatgaatgtatgccaagtcgaatttaataaaaaggagacaaaacatgggaaagaatataaataaattagttactcttgctattggaattagtgttatgagtggaagtgttatacctgcatttgcagatgatgaggtacaaaatgttgctacagttacaaatgtataaacccaagcaagtggaaaaccaatacttactttagaagatgctataaacggaggtattatcaatagtaataaaatagcaatcaataataaaaaaataaattaacaagatcaaagtaatgacctaagtgaaaatcttgatgatgttagtgtgacttcaggatataaaaaagacttgaattctgatactagagacaacactttaaatcaacttaaacaacaaagagattttgatgaagattcattaactcaacaaactactactgaatataatggatacttatgataaagttataaatggatatacaggagtattgtcagctagattagcttgtttaaatagcaaatcagatgtttataaacaattagctaatttagatcaaaataaaaagcagcttaaaaatcagttaaagactctttatacaaatcttcttactacagaagatagtataactacattaaagaagaatattgatttaaataataaacggctagtaatgcaaaacttaaatatgacttggagatgatcactaaatctaattatgataatcaagttttaagtagtatggatttagatcttcaattaagaactaatattaataactataatattttaaaacaagagattgaaaaaacttggattacattatcataatagttatagttgtcaacaaatatatttaatgaatacttatttttgatttgatttagatgagagttatgtgtattcttatatgaattatataagaatacgggatatacgcaatagattaaaaacatctgttacgtatatttttttgtcttaaaaaggtacacgctaaaccatgtgtacttaaatcaaaatagacgactaaataacgaaaaaaaataatgtagcaaatttgtcgtacacaaatctaacaacattccgttttagcatcttaaaaaaaactaatattgcaagttatataatgaaaaatttgtatattttttaaaaatattgtattctataaatgtaatcgatgctaatagttaaaaatttattattaaaagattgtaagcatttttggaaaaatatttgtaggcttaatttttaaagtttttttaataggcaaaggggatgatgaaacttgtaatatgcaaactggagaattacaacaaattattgatgaaagttatattgatgaaaggttatataaaattggaggggaaattttgtattcaattattttagtagaagatgaatttacgcaaagagagattttaaaaaaaatgattttatctgtatgtaattttataaaaatttatgaagctgatagtgagagtacagctttagatatagttaaaaataatgacattaatatgtttttaatagacattaatttaaaaggttcatcaggattaaatctcgcaatgaatattaggagcattcctaaatatgaatttagtcaactaatttttttaacaactcatatggattatatgttacaagcatttaaacaaacgcattgttatgactatatattaaagccttataataaagatgatatacaatctatgttaaataaacttattgatagggcgatctgtaatttaaataaagttgaggagaaggaattcattataaaaataagaaaaagtatattcgtaagagtaaaggtaaatgatgttttattcatagaagttaaaggtagagattgtgaagtaaataccgttagaggaatttatacatatattaatataagtttgaaaaagatattagatttaattgattgtgattacatagttcaaagccatagagcatttgctataaataaaaatcatatatttaaaatagaaaaggtagatattagactaagctgtgtatactttgaaaattatccccaaactgctcttatagggattaaatttagaaataatattataccggagtttaaaaaggcaggtaaatattatgataactagtttttttataaatagtttagatactataaacataatttatttatgggcaatattaaacaaaaaaaataatagtttgtatagattattgtttagtataattacttgttcaatcttagtcacggctgttgaatattttgaattgaattttattctatcatatatagtattaatcacaggaataacaattacatgtaaaaaaaagttaaaagatataatactagagttttttttaatattatttatagaaatgagtttccaactggtaatttcgttgattatgaatgtatattcttgtaatgatgatattaaagcgattattgtagaactaataacgttaggaactatatttattttttcaaaattaaatttaagtgataacattagctttgaaaaaataaataatgatatttctatgtatttgatttcgacatttagtatggatgttataatttttaagattattttggtttatgatgattcactaatttcaaataatttaccaattacagcgataatagttagtacatcagttatttctcaaatacttatatatacttctattattaaagaaatgaaagaaaatgagaaatttaaagtatcaatggaatacgatgaagtaattggtgaaatagttcaagaaataaaacaacggcaacatgattttattaactataagaatacaataaaaggaatagtagaagttgtagatggagacaaagtcggagaagaaattagaaattatattaaagatgaggacatatatgatgataagataaatgaacttatttatattaataatgtagttatgagatctataatatatagaaacatgtgtaaagcaaaaaaatataatattgattttaagtataaagttaataataatgttttagatgatattttaagctataatgaactatctaatgtattaaataatttattaaacaatgcctttgaagaagtaatgaagtatgactgtatcaaaaagaatatcgaaattgaaatttttaaaaaaaatgaaacatctcatttaatagttaaaaatcaaattgcagattcgaataatattaatttaaatgagatgcttaaaagaggttattcaactaaaaatacagacacaagaggctatggactgtataatgtagaacaagtaattacctcacataaaggttgccttgaagttaaattagagttaaaagaaattattttcaatatttattttaataactcttcaggataatctggctcaccgtaatatcctgcacaacttgtgtttgatattaaaccaaataggttaattagtaaagttgaaaaaattttcgttaatttttgcattagaaataactcctttcatgttaacaataattagttgagtaatttgtattaataaacttagaaatatgcaattacataattgtgtatttctaaggataaagaataacatacaccaaaaagtgagggatattaaagatagtatttttaatatctttttattttttattggtctcttttcattacaacatggggcattaataaaagttatgataaatgatattataaaaaaaaacacgctaaaataagtatttagtcccgaagagaatatgctaaataataatattatcaaaaaatacattatactaaataccagacatgacttaaatgttttgcaatggatgccgcccattaaaggtcttgttgaatttagaataataaaaattaagaaaaatagtggcaactgacctacaaataagaagattgataatattactaaagattttgttaaatcccctaaaattatttgtagcgagtactgaatttttagcacatcgtttttacttaaagaactgttatttttgtttaaatattctgttaagaaattggctattgatgctatcatttttacctctcatatatattaaataatataaacatataatgaatgattatagcgaatgatttataaagattcaatactattagcataaaacatacattttttgttgtaaaagtatatttaatgaaaaattattataagtgttaacatgaaagtggttatttctaaattaagtgaagaaattttttcagcgctattcacagatataaaaaatatagtggaaattctggaagtagaaaaagtagctgtaatctttttggaatagagtctggaactgagataacagatttcctttgttatttgcagcatttttcaaatcagtttgttcatttgaagaaaaaaacacttatgtgagtgaaggaaattttataagaaggtataaagtaatgctaatgcaaaaaggattagctagtaatacgggaattataaattggaaaaaagtagatgttggatttttgggatttttttcaagtgattttttagatatatcaaaatctaatattatgatagacagtgcatttacatggacaaaaatgttgcttaaaagaaaaacattagtaaatccaataaggaatatactgtttatcgaatttttatttggtagtttaaaagatataatcaattttaaggaaactgaatatagaccgtttggagaaggaacttggccatgcttaaatcctgtagctgtacattataaaaaagatgtagtgacaaacttagaaatttcaaatagaagtacagcagataaaccatttggaatttttaaatgcaaatatggatattaatatacaaggttaggaccagataagggctcggatgacagatatgcaaaagaacagtaaaaagttataaagaggtttggatgaaggaattagaagagtatattatatcaggaaattatagtatttcccaaatagctagaataatggagtgtgacggaaaaacagttggggtatatgcaaaagaattaggtatttctgaattattaaattctaaaatgaaaacatattcattaaataattaaaaagaatcaaaatatttaggatatctagaagaacaatataagttatatataattacattgataaaagaaaattcgaagttaaaaagatcagatgtaaagagaaaatttgaaaagcaatttgtatggatgtatagatataggaaagaatggctttattcaatatttccagagaaaacagataaacatatagatcataagaagataaaagggcatgttacttagaaaattagagatagtgaattatctaaaaaagtactcaatgttataaccgacatgaagaataataatataaatattacaatctcaagaatttcaaaagaattaacgtttccaataaataaattttaagtaagttactacatacacaaaagatgttaaaggacaataatattataatagagaaataaacaagctttattgtacaaagtaattttaatttaatgtcactaggactatttttgaacaagatttattgtaataaataaaaagccactgtagcaatttcataatgtttaagtgggtaatttgaacaaactttattgtttatcacattatattgagcatgaagaaagcaggggcgatcctgaatcttcatgcttcttttatttttacaattaatcatagtaattaatatctagtgacattaagattgaagatgtttctcctaagggaaggggagtaggaataaaagtagtaagagaagcagacaaaattaatctttattcagcattcctatatggccatttttaaaataagatctaaataaataagacatcttctctgaatcaggagtacagtttgactttaaccaccaatcaatggtaccgattaaagcattagcagtaaataagaatgccatttcttgtatctccggggaacagtctttatcgcttacaagaaaagagcttcgtaatttttcacgctctcttagcattgagattatgttgctgcgcagtctagacataaaccatatgttacatgaatcatccagcattgccagatataatcgcttgttttcagcaaagtgatcaaatagtttcacccagggatcagatctttggttttcattaagatttttaagactttctttaggaggacctaaatccttcttcagtctttccattgcgtcttcaaaaatctttagtacaacgtcgtatttatcttgataatacctataaaaggtagaacgattaatcatggctctattagtgatgtcactaactgtaatgttatcgaaatgtttttcaaaaataagatcaataagtgcatcccttatctgctgatgtgtgcgttttgttcgaatatcatgtttattttgcaacattttcactcctttgttgtatataaaacaaactataagtattgttggttgaatacaaatctgtatatgatatattttaattatagcaacaacgtgttgcataaacaatgaatactgtaaaggagaattactatgaataatttgatttttaaagatgatcaatttgcatccaaggtattaggccttcttggagatacttctttcaaagctgcagatataggagaggtggtttcaacagcagaaaagattaaagaaggagattatcaaagctggtgcgaggaatggacaaaaacagccaagcgcttgcaaaaagttgcagaagatagctattcggatggtcacttgataagtgcaagaaaagcctatcttagagcttctaattattatagaattgcagaattctaccttcatgaaaatccagagaatccaaagatagatgagttatacaacgcaagcttagattgcttttcacatgtcatgaaacttaataagcctgttattgaagaagtgaaaatcccctatgaaaatacaacacttacaggacatttttataaattagaggattcagaggaaccaaaaccagttttaattgctatgactggctttgatggaacaaaggaagcattttgcggaatggcaatggatgcacttgaacacggtatgcattgtattgcttttgaaggaccaggacaaggagaagctgtacataaacaacaactatttttcagacatgactacgagaaggttataaccccagtggtagactatctgcttacaagaaaagaagtagatccaaagaaaattgtattatggggacaaagtttaggcgggtatcttgctcctagagctgcagcttttgaacatcgacttgcaggttgcatagctaatggaggagtatatgactttttaggaggatttacaagtatctttaatatgccaagagaagaatttttaaatttcgcactttctgattcagagggatttaataaagctgttaaggaaaaagtggaattaaactcaaaagcaaaatggagcttttcacatggtatgtatgtatttggtgtaaatacccctgctgaattcattctaaaggttggagatttttatatgaaaggattagcagaaaaaatacagtgccctaccttaatcgttgattcggaaaatgacaagcttcttagagaccaagcaaggcaattgtatgaggagattacctgctataaagattttattttatttacagctgaagaaggtgctgaattccattgccaagctggagctaaattaattgccaatgaacgtatttttagttggattgaaaagatacttaggaatatgtaaataacataagatttaaatttttatatttaggagagatgaaaaatgtcaaaagtagttatttttaagggtagtccaagaaagaaagggtatgctacaaaattattagatcaagtagcaaaaggagcaaaatccaagggtgctgaagttattgaatttgatttaaatgatactggaatccgtggatgtcaaggttgtttttactgccgtactcatgatggatgtgctgttaatgattatttacagccaatgtacaaagctattgatgaggcagatgctattgtatttggttctccaatatatatgtatcaaattacaggtcaggcaaaaatttggttagatcgtacgtttccgatggttgaagagcttcctgataagtttattcctagacatccaggtaaaaagttaataactgtatttgctcaaggaagcttagatccgaaaaaaggtgcagaagccattaaatatgttaataatatttttgatgtgtttggttggaacttggaggattgcatccactactgtggaactgatgatgaagtttttaatgagttatctttaagagcatttaaagatggagaaaatttggtttaataaaatgcattttagaagtttaacttttgtgtctaagatattcacataataccattatgcaggaagagaatttgccatataatcagttgtcataataatgtgattgctagctatagtggaaaaaaggtggttttcatatgaaaaccacctttttggatgttatttttaaattaaaaatagtttacagcattaatctatattataagataaaaggtctagatggtggctttattgtcagtatttttactaacataaagattgcgcgatgcgcctagaccggccaataagcataacccggcagcaccgattaagataataagcggcaatgtccagttgttaaccgcatcatgcagaaaaccaaaaagcatcggcccgaaagcagcgagcaagtagcctcctgattgagccataccggatagtcttgctgcctcgtctgcatttcttgtacgagagctgaaaaatataagagctaagcaaaaagtaagcgctccgccaatacctaatataactatccatagtgctgtaagccctgtttctccgaggaatatccccaaaagccctaccaaaacacatagggaagcagtgataactaatggacgttgattagccttattcccagcaagtacagaaccaacaaacgatgtagggagagataccagttggtaaagggagagcatccatcctgctttgcttgaatccataccttgatgaactaaaatagctggtaaccacgcaaccatgcaatagagtagcatagactgcaatcccatatatactgtcacttgccatgctaaaggagatttccagagattgatcttattaatactatttgcctcaacgatctccatttcatcttttttttcgtggacgtctttggcttttgttctaatgccactatgaaccgttctttgaacaatagatagtctttgttttcttcgtataatttgaggtatccagaggacaatggataagaaactaagtgaagcccaaatgcttaaggctactccccatcctaatcctgattctgaagcaactgggacactgataccggatgctatagcgccaaaaaggcccatagaagcagtatagatacccgtcattacaccgatccgctcaggaaattcatgttttattaagctgggaatcagcacattacctacagaaatggataatccaatgattactgtaccaagaaacagtcctaaatctccaaacaacgaacgtaatataattcccaaagtcaggaagataagtgaccaaaaaagcactaacttagtgccaaattttcgcgccaaatttggagcgaaaggtgaaaatcctgcaaaagcgaataacggaagtgtcgtgatcatacccgctaatgtatttgaaatatgtaagcttctacgaatttcatcgatcaacgggccaactgctgttaaaggtgcacgcaaattcgctgcagtaaatgtaattccgattatcagtattatttgtatggatcttcttgaatgtggatgtgggttttgtgtgtgttcattacgtaattgattcatttatatagtttctccttaaaattatcatatgtttatacttgattcaaatatttttttagagcaaaagtagcttcatcactgataatatgctccattttgcaggcatcttcacttgctgtttgctcattaacattgcaataggcaattaagaattgttttattagctgaaacttagttgtaattatttggccttgtttacgtccttcatcagtgagctggatttccccgcctaaaggcttaacaactaatccggcctcttgcaagatagccacagcattattaatacttggctttgaaaatcctaaataagcagcaaggtcaatcgaacgtaccgattgtgttttttcagataacttatatatggcttttaaatattcttcttttgaaggactaagttttttctgggaataacgcctattttgatacatcactgatcctccttgcattaattatagattaaagcgtattggtggtatacactttggtacaattcttcatttatcttatttttttagagcccatcaaatttattgttttccaatttgttattggaaagactcgttggtggaaatatcggacgttcatatggataaaaaccaaagagaacgcatgaagataaagaagtatagatagcccataaactcatttcagcagtccgtaaacctctttcatcagcatcaagtgttttaggtttatgctttctcttacttactttactattatcaaaactcagaaatgactttaataattttttctttttcatattatttcctcctaacttaattgtgatgaaaaagcgtatagcatacatacacatgtataaaattttaattgaaaaacttaattttgcttattatgaatgagaaaaatttcaattcacgtttggagacattttgtggttcatatccaactatatttgacacaatagaatggtagttcacatagttaatatgagtttcttgctttgattatagataaagggtgtatggttgccatatgcctgggggtaattgtttatatattcacttacatattttactattatcagaagtcatatctgacctctgataattttctctttttgatattagcattttctagcttaaattataatgaaaattaacatagcagctatacacttgcgtaaaatatttattcatcaaagttttcattaaaagatttaactttgtttatcatagacgataaaaagtttgacaaaaattctaattcatattcggaggcattttgtagctcatcttcaaacatgctgttcaaaatagaatgatagtacatatggctgctatgagcttttttacctttttcactcagactcaacgaatatctagataaattaagattatcaatttcctttataaccagagcctttctctctagctttttgagaatttcagaaacagaaccttttgttactcctagaatatctgctaatccacccacatgaataccaggatgttcagcaatggcctttattatatgaatttcagagtgaaaaatcggcacatcagttccgaaatagcgagtctttttatcaagatcaattaatgcaaatgctaaatccagagaatcatatgcaattttatgtttgttatttataaatttatccatgacaacagtatatggctgccatacgcttttgtcaagttactgttgaatcaatattttatatattgtaacgatatgatatacagtagggcaaatgctaaaaaacaacttttataaaagtggaagaaatatgactgtgacataatttctataaatattaagcatgcataaattcatgtaagtaaatttcgtgcatgcgtatactatttattaatagagatttaatataagtttatatatcagcaattactctgcaagaaattccagaaaaaccattcatgtttgtaggaaaagtatatactgtaaaagattttttaggagcttcttttaataataaatctaagttaacaagattttcaataataaaaattcctttttctgcacaatgtaaatcaatacgagggtgatctttaggttttttagctcctgccatatctacacctataaaacttactttcttatcaataagataatctactagctcatcagataattcaatgtatgttgaaaaatattcttttgtaccatatccatactgctttaatattcctgaataaaagagtacaaagtcattctcttttatgccacttaaatctaaatcttctaatttcacttcgccagtctttatatggcttatatcaaatattttaccgtttgtaataatattatcgattgaaaattctccattcatgacatctaggtgagttcctatatgtccagatttttcggctgcttcattagtggctttagtagtagcgtgtatttcatctaacatttcttttttaattttaaaacttaaatcaattttcatttgataacctccaatatatttaaatagtttcctgggaaacaacatcataatatcataatattatttccttgtaaactatttttttgaaataatattgaatatatgcataataacaattataatataattgtttccaaagaaattaattttaaagggagattgtaattatgaacaaagaaaatgcaaaatttgagatggatttaacaataaataagcttgtagcagtttttgaacatataaataattcaatggacagtcacggggacgaaataaaaaatttgctaatccaatataatcataaggatctttatgatatgggtttaatgctttcggaaattcacgtaattgattgtattggaaaaaatcaattaattaatgcaacatttatatcaaaagaattaaatatgacgaaaggtgctatatctaagattactagtaagttgctaaagaaagaattgataaaaggaaatcacttagaaaataataaaaaagaaatttattatacactgacagcacaaggcaaagaagtttttaaagtacatgaaatacttcataaaattgagagtgagaagtttgtgaaaatattaagtaaatatgataaagaggaactaagtattataaatagttttttagaagatctaataagcgagctttaaggaggataagataataatgcaagaaaataacgatttaataaataatggagaaactcaggcaaaagaatgtattgaaactatatctaatttattaaatgaagtgagaggaaatataagtttctcagaggaggtagctaacagaggagatgaagtgaatagcttcattgaaacttttgaagagcttttagctcatacaaaatttatagaaaatatatcatctgaaataaataatgtcgcatctagaactaatctgctagcacttaatgcatcaatagaggctgcaagagcaggtgatgctggaagaggattttcggtagtggcagatgaagttaaaaagctttctattggcacaaaagaattggttttaagtatgaatgatacactgaaaaagatgtattgtttgacggaggatgcaaatgatgaaatagaaaaattaaaaaataggttaaaaagtattcagcaatctagaaacaatttttctaaattaagtaatgaaatagatattatagttagtaaatttgatgaattgaaaaaaataacatattaatcagtgtattaaaaaatattctgatagggctttattcaaaaaatatatagcatgaagaaatcaggtttaattctgaatctttatgcttattttatttttgaaactaactataggaagcataatatatgataatttatagatttcaaaaaagttctatcaggttaaaagaattcgaattaaaattagaatctaaacaatgttatatataataaagtaagagacaaaatatttaaatttagatttggcaatttggttttattcatatttttattaagaataattataggttattagcataaaacggttgttttttagaataaaaagaatattttcgagaatttaaattcaatactttgaaatttacatttaatgtagaaatctgtacgtttagagaaaatgctatttaattaattacaatattgtgagaatatgtaattgaaaataatctacaattaaagggggagaataaccatgaaaaaaaacttaatagctaaaatcactctaggagctttactatgcgctagcattataccagcagcagctagctcacactacaaaactttgaaattaaatagctcaaatgcaatacttcaaccacatcaacaagcaacagatatgggatatcgtgtaaaaaatcatgatgataaagaggtagcaattttagcaaagagcatgcaaaacacaacaaaagttgatatgcgtgcattggatgcgaataaaaatgttattttagattggaaaaagattgatacctatgcatattggcaaaactggagcattgatcctgttgatgggacagtaatccaaaaagggtcttcaatagatatgcaacttcgtgaccattatgatcataagaatactagttatattactgatggagaactagactatcaataataaatcttacaaaaacaatttaattgtgaaaagagagcttaaatgctctcttttcacaatcaaatgggaggagaaaagatgaagaatgaattaaaaatggaatttagtagatgtttaaatagtaagaagtttaaatattgtttttctattttatttgggttaacaattttatcatatgcaatgttatttaaacaaacatttcagcgcaattcattacaattgggaaagacgacagattacagtatgataattagctctagtgatataagaactatatttttaacatttgtattaattgctccgttaatatgtaccttaatgtatagtgattcttttatagagcagagagagaataacatgtattcaatttttttaatgagatcaggtaagaaaagatatataatagccaaaacaattacaatatttacagttacatttgtttctatattttttatacttggatttaatgaaatattaacatggatatcaatacctgatgtaggcatcaataatggacaacctgcatacttaataattcaaaataataaagcagagtattttttacaagatatttatgatagatttccgcacttatataattttattattattattattaccgcattattttgttcaatatcctcattaatagcatttaatttatcgatgatatttaaaataaataaaataataatggttattataacatttttaatagttaatgggactgaaatgtttttgtctgatgattatcaaatgcaaatgtatattcaaacttggccagctgagtttaaaaaatttttaatggtattatctatttggatattactaacagtgattacatttgtgataggaataaagaaagaaattatttagttataaaaagaaaggaaagcatatagtttatgagcatatatttaaagaaagcgttattagatattaaatcaatctttttatttctatttatatttgcagttttaatatataatttttcaataggtacaactgcaaattatagtaatttcgatatttatgatatcggggtaggctttttcagcagaataggagcaatcatgttagcatacttactattgctgagtatacttatagattattatgataaagattatataataatcagatttcaaactatagagaaatggagattgtctataataaagaaccaaatattcctagcaataatttttacacttatattgaatgtaataccagtcatatatatagtcttaaattcatctgttataaaatatgacaattggaagatgtacctagcaattaatacaataactcaagctgctgcattcatgtcagtaggtttttttgctacattagtgtatttcaaaacattgaatttaaagtttgctataacaattcctttcataatatattccatattaaacttaattgataactttctattgaatcaatatcttaatatttctgcaagcttttcaataccttgcggttctaatgatttcattatttatgaagtatgtaggaaaacattaattatagcattgattttttatattatatctacatcaattaagaaaaaaagagatatgtttaattttgaaggttagtaggaggagttatgagttacattgaattaaagaatgttagtaaagtagtaaaagattctaaaattttagatagtataagtttatctttagaaaaaggaaaaatttatggattcctagggagtaatggatcagggaagactatgctatttagaactatctcaggattaattagaccaacaagtggtgaggtctcaattaatgacaaagtgattggaaaagaaattgatttccctgaatcatgtggtataactattgagaatacagggttttggaatgatcaaactggatttgataatttgaagaatatagcaagtataaagaatatagtggatgatagagctataatggaatcaatgcaaagaatagggttaaatccacaagataaaagaaaatttagaaaatattcattaggaatgaaacaaaaattagctttagtacaagcatttatggaatctcaagatcttattatattagatgaacctactaattctctggacgaagagtcggcaatcagagtgagaaatatattaagagaagaaaggagcagaggagcaactattttaatagctagtcatattagtgaggacattgataggttagttgataagaagtttaaagttgatcttggtagagtatatgaaatttaaatcagaaaaaaatttattttatcttattatatttctaataatatgtataggcataatatcatcattaatattaagatcatctatcatcaattatgattataataaatttctctcagaaaagaatcaatattcatattatccatataaagatttaagatattcaggtggtgtattcacagatataagcgatgaaaataatattgatatgagtaatttttcagattatatagtagaaggagttgcaacaggtaaacatgaaattttaaatagtgcggttttaactcagattaaaatcaccaaagttatcaaggggaatattaataaagaaagtatttatatttatgaacctgtatctatagaaataggtgaaaatcattccaaacgtcttgaatctatgttaggttacaatttaattaaaaatgatgaagagtatgttttctgtataaacgatttttctaatattgcagatcatgtttacacagataaagagaaaaattcatacatatataagaacccatttttaggtaagttccctataaagaatgatagctcggattttagaattgtagaggaaaatgaattctataataatatcaactataatgagtatgcaaactatgaacaaatattttcatctaaaaaaagtatggatacttattttaaatgtaaggaacaacttatgcagataataaattaataattccaatataaaaggtataaatatttaaatattaattatataaattttaaatttgatcctataggatagataattttataaaagtctatcctataggctatttttttgaggactaatcataaattatttttatagaaatttatgaacctaaaattcacatgataaatatacaaaatataatagaaatatacaatcggtttgaatgtaaattgatataataaggctaaatcgaagatattactcatgggtataaaaataaataatttatttaaggtgggaaattatatgttagaaaaaaatttaaacgaaatcttaaagaaaaggtttaataagatagtgagagaagcgagtaatgaagaaatctatttagcattattagaattaacaaagggaacaatcaagaaaaagagtgttaatagagggaagagaaaattatattatatttctgctgaatttttaattggcaaattactatcgaataacttaattaatttgggtatttatgaagatgttaaagatgttttgactaagaatggtaaggagttagctgaaattgaagaaattgaattagaaccttcgctaggaaatggtggacttggaagattagcagcttgcttcatcgactctattgcaactttaggatttaatggagatggtgtaggactaaactatcactttggattatttaaacaagtttttgaagatcataagcaaaaagctgttaagaatccatggataacaagtgaaagttggttgaataaatctgatattaagtttgaagttccatttgcaggattcacagtcatttcaactctttatgatatagatgtaactggctatgatcaagaagtatcaaataaacttcgtctatttgatgtagatacaatagatgaaactttagttaaagaaggaattgattttgacaaagaagatattaagaagaacttaacattattcttatatcctgatgatagtgatgaggctggacgcttattaagaatatatcaacaatatttcatggttagtaatgctgcacaattaatattacttgaagcagatgaaaatgggtatgatcttcataaattacatgaacatgttgttgttcaaatcaatgatacgcatccatctatggttattcctgaattgataagcctgcttggagaaagaggtatacctatgtcagaagccattgaaatagtatctaagacttgtgcttatacaaaccatacaatattagcagaagctttggaaaagtggcctatagcttatttgcaaaaggttgttccacacttattaccaattattagagaattggacaatcaggttaaacttaaatttaaagatgaaaaagtagctattatagataaagatatgagagtgcacatggctcatatggatattcactatggatatagtgtaaatggtgttgctgctctccatactgatatcttaaaagaagaagagttaaagccattctatgatatatatccagaaaaattcaataataaaactaatggcataaccttcagaagatggttaattcattgtaataacaaacttgccagctatatttcagaacttatcggagatggatataagaaagatgctgctaagctagaagaattagctaagttcataaatgataaaatagtgttaagtaagattggagaaattaaaaaagaaaataagattgcattaaaggaatatttaaaagaaacacaaggagtagaaattgatgaaaattctatcttcgatattcaaattaaaagacttcatgagtacaagagacaacaaatgaatgtactttatattatttataaatatctggatataaagaaggggaataggccaactacacctataacaatgatatttggagctaaggctgcaccagcttatgtaattgcacaagatataattcatactattctttgtctacaagaaataattaataatgatccagaagttaataaatatctaaaagttattatggttgaaaactataatgtgactaaggcttctaagttaatacctgcttgtgatgtttcagaacaaatctcgcttgcatctaaggaagcatcaggtactggtaacatgaagtttatgctaaatggtgcattaactctaggaactgaagatggagctaacgttgaaattcacgaattagttggagctgaaaatatctatatatttggtgaatcttctgaaaaagttatcgagcattataagaatgcagattatgtttctaatgaattctataaaaagccagaaataaaagaattggttgactttatcataagtgatgaaatgataaaagttggggatgaagaaaatcttacaagacttcataaagaattagttaataaggattggttcatgactttacttgatgttgaggattatataaacacaaaagatatggtatttaaagattatgaagatagagaagcttggaacaaaaaagtgttaatgaatattagcaaagcgggatttttctcttcagatcgtacaattgctcaatacaatgaagatatttggaagctataatttataaatagaataataatttagtttaagtggtatcgatcccggttagcagcaaatttaactgataagaaagactaaaaatttgagagttcaagtttttagtcttctttttattaaagtaaaagtttgtttattatccaaaattattgttcctatattcagaaggtgaaacaccagtaaatgatttaaatactttatggaaatggctttgatcatgaaaacctaaggttaagcctatttctaaaatgctactagttgtagttacaagcaatactttagccctatcaattcttattttttttgcatatttcataatagtcatgcccatatgttttttaaagcaatctgatatatagccttcagatagatttaattctccagataatttttttaatgagatttggctttcaatattaagatgtaagtgcttcagaattctatttatgacaaagttatctttcacttcaacgtcatttataaggagattaatgtatgtatctatcatttgtatttcaatagtttgtaaatcgtctatagtattgagggtagggattaaagtatagaatttgttgtatattggatgaagatatctcgttaaaatgccattttcaactatttctctagtatacatagcattccaaataagcaaatcgtttttcttatcctgtatagatatctcatcggaaatttcatctaaatgcttttttttaactatttctaagatttgtggctttgctctaagttttattaagaatgatatgtcattattaaaaatactcatatctgatatgaatgaattatccaaggtaatttcctccacacactctactattataaatgtatattaaatatatacatattatattaaatatgtacaagtacaatcaagtattagtaagtaaggtagatgtaattaatgaagattcatatggtaaaaatagtataattttcgactcgattttatgctaaaagttaataatattatagtatatatgtaaagaaattgaactatcagtgcgataataaaaagaatatgtaaattgttattgtaaaaattaaaagggaaaataatgcaaatagataacagatttgattaagttaaattgttatttgttcaattttatgaaaaggggtaatagtaatgaaaacgaaaaagtttagggttaacactattcgcagcaaactagttattagcttaataggaatttgtgtgattcccctaataatattaggttatggtgccaatatacaggctaaatccatccttaatgaaaaactaaaattaacaagccagcaaacgcttttagaagtgaatgatggaattagcagctattttgatggattcagtaatatgataactatgacatccacagattataactttgttaacagtgataagagtgagcaagcagcatacataccagaaagtctaaagaatttaaaagaaagtaatagtaacatttttagttcatattttgcaactactgatgggaaatttgatatatatcctagtagtaaaatgccagaaggatttgatccaagagaaaggccttggtataagcaagctgtagataataaaggaaaagtaataataacgttaccgtttacagatgctcagacagggaaaaatgttgtgtctattgcaaagacagtggaaagagatgggaaagtcataggagtttgcgctatgaatgtttctttagagacacttacagaaaaaataagcatgaaaaagataggaagaacaggatatgtttttatttctgatgtagaaggtaaaagtatgatagcgcatcccaataaagatttattaggaactgatgcagcatctaaacaatctttttggaatgatgctaagactaatgaaaagggatttataacgtatacctttaataatacaaagaagtttggagtatatgaaactaataatattacaggttggaaattagtagcgacgttagatgaaaaagagctgtcaaatgatacaaattcaatattaactacaactttaattataatagtagttatatgctttatttcaatagttttatctttattattaagtaaaggaatagcacataatattaagaaattaaaagaagtatttgaaaaagcctcaagtggagatttaactgtctctattacttcatctacaaaagatgaatttatggatttagctaattcatttaatgaaatgctaaagaatatttcagagcttatgaacaatgtaactaaatcatcaaaaacagttttggaaacgtcatcgaatcttgcaagtatgtctgaggaagtaactgcatctataggagaggttgcaaaagcaatagaagaggtatcagaaggggcaacaaatcaatcgcaaaatgctcaaaatggagttacagaaatgaatgatttgtctaatagattagataaaataagtgtaaattctaatgaaatggacaaactatcagcaagcaccaaagaattaggtgctaaaggattatctatgatagatacactaatagagaaatcaaagaaaactaaaatagctacaggtgaagttgatagcatagttagagatatggatgaaagtactagaaagataaatactatatctgaaacaatctcgcaaataacagagcaaactaatttactggcactaaatgcaagtatagaatctgcacgagcaggggaagcaggaaaaggttttgcagttgtagcagaggaaataagaaaactcgcggaacaatcaaaatcatcaacagaagaaatcaaagttattattacaaatatccagagtaagtctgatacagcggttaaagcaattaaatctacagaaagtgtagtgacagagcaagatttagcagtaggaaagacacaggagatatttagcgaaatccttagatcaattgaaacgatgataagcaaggttgatgagataaagacttctattattgatgttgatgagaaaaagaaaaaagcggtattagaaattgagaatatatcactaatatcacaggaaactgcttcagcttcagaagaagtaactgcatcaacagaggaaataacagcagttatggatagattcacaaaatatgcggatgagctacaattattggcggaaaagttagatgaagaaataagtaagtttagaatgacataggtagaattacaagttgaatttgatgtaaaaatctaattcaacttgttctttatttataggaataataatgaattaaagttaatattatcctagataatttaattatttagtggtatcattatatagaaaattggtatattggaggtatgattatgaagagtttaaaaggaagcaaaacagcagtaaatttaatgaaatcatttgcaggggaaagccaagctagaactagatatacttactattctagtattgctaaaaaagaaggatttgtgcaaattgcaaacatattcttagaaacagcagaacaagaaaaagaacatgcaaaaaggttttataaatttcttaaggatgattatgttgacgagcagatagaaatacaagcatcttacccagtctcattccacgaaagtacattgaaaaatttacttgcagcagcttcaggcgaaaatgaagaatggacagacctttatccaagttttgcaaaaacagctgaagaggaaggatatccagaaattgcagtagtttatagaaagataagtgaagttgaagcacgacatgaggctagatataaaaaactagctaaaaatattgaagatggaacagtatttaagaaggatgaagtaactctttggaagtgtggcaattgcggatttatatatgaaggcaaagaagcaccagctgcatgtcctgcatgttcacatccacaagcatactttgaagtatttgttgaaaattattaatatagaaatcaattagacatacattaaggggacgcttatatttaagtttaaattaagtgtttccttttttgtgttagtatttttgaaaatttagacagttcatatttaccgtgttaaaataaaagaagtatataaaaataagacagatggtgagtatatgattaaagctaaattagaaaagaataaaagtggaaaaataatatttaaattaaaaatagatagcgattataaagaaaatattttatttaaaagagctattatggaatcaaaagaaattaaaggacgatatcaatatgaagtacctttaagattctttattccaatatgtaagaatgtaggtagagagaatttagtattagataagagatgcatattatcttatttggaattctcagattattatgatgaaaattattatacagatatagatgctaccgcaaaatatatgaaaaaatggagagaagaaggttgtcctgatatttatagaataactatagataaagatagctatgaaataacaaaggaggtagtctttaagaagcctaaggtagtaattaaggatttcagtttataatatgtattttaaaagagaaataaaaaaaggagttatctcaaattataagtaatttgagatgaagcctttttaatgcatttcagtattattgactataaattacgcttgctattatattagtaatttctaatgaattgctagagagtaaaaattcatgtatagaacttaggtttaaggatttaagtaatagcaaatcattagtattagctttgaaaattttattgttaatagtaaatttaaagctaccacttacaacataaaaacaaatggctataagttccttatctaatggaacttgatatttgaatacacacttttttctaggcgtaatatttaaatgaactaattcaccattataattctctcttgtcattaagttaaaaacagaggcttttccataagtttttgttttccaatcacccatgaagctatcttgttcaaaggcttttagtaatttcctatatttattttcatgatcaagggttattttgccttcagtaaccataaatttacgtgaaacatttgtaagatcgctaaaagtagattctggtatatcaattttagctataccaagtctccataagaagttccggcttgcataatcagaatctactggatatgttattaattctgtcgccattccaccagaccaaaatgtcggtttatagctcttttctcttattaattcaacatcgtagttcataaattactctccctttatttatcacatattttatgttcattatattaaaagatatatgtataatcaataaagataagtacaatataaagcataattaattttactactatgtaagggttactatttttagatatataaagaatagacataagatgctttagtaagtaaaattaaaataataagtaaagtgaatagctagataaaatatctatagatttattaatttgagaacaatatgaagttcatgattgatatgaagtataattataggagttgtttgtatggaaagctttattaataagaaaatactaagaaaagaaattttagataagcgaaaaaaaatagatgtaacagaaaaagaaaaaatggatgaaagaatattagaaacagtttatagtagcgagtactataaattggcaaaaaatatttttgtttatatatcgtttgacactgaaataaatacaagagattttataaaggaatctttaaataataataaaagaatttatgttccaaggactgaaattaaaactagacttatggatgcagtagaaattaaatcactggataatttgtcggagagttcatacggaataccagaaccatctataaatgatccatatattgatccaaacgaacttgatttaattatagttccaggtgtagcttttgacaagcgtgggggaagagttggttatggagcaggtttttatgatagatatttcaagaaagttaacaaagataatataaaaagaattaccaaattagcattagcatatgattttcaagtacttgataaagttccaacaagttatcatgatgtaccagtagattacattataactgaaaaagaatttataaagttggaataatgtaatggcggattaaaataaacagggggaatatatggaatacattgaaagtaattttggttacctaaaaggaaccaaaatagaaaagtactacgatcatctgataaaagcagaatttttatgcgagtattatccaatagttacaaagattattgttagaaaagtaatggaaatgcttttaagagatatagcgcaggacagtggaatggatatgaatgtttctgcacttacattactaaatggtattaagttaaagtctaatatttctttttcagaagaaatttataataatatagagattatattggctaacgggtatgagaacatttcaaaaagagatagaaatagaaagatacctaaacatccaatagaaattttaaaaatagctcaaaaggttctatattactatttgaaagaaaaagaaaatttgatgctagatataaagaatttaagttttagtgctcctagtactatagaatatatgaagaaagaacttttaaagatcaataacgatattgctcaaagagaaaatttaatcaataatcttaggaaaaagattcttgaggtagatagttctccaaagcgaataagtgaaataaataacatcataatactaataaaagaagaaaaagcttatttagaagaaatccaagatatattaaatagaaaagtagaaatgcaaaataaatgtgtattgaatatggaaacggattataaaacatatgaaaaaaagcttaatgaaatgaaaattaagtttaatgagaatgaagaacttcttctagaaaaagaggggcagcttctgaaggctgagatacaaaatcaagaattgaaaatatcgactgaggagttagatgacgaagatgaatcaataaaaaggatgaaagtatcactggatgaagaattaagaacattaagacacgcatatgaaagtttattaaacttaacagaagaatataatgatattgttgaaacaatagaattttcatatgataatgagctacgaaaagaattagaagctaaaaagaacagtattcaaataaaaataaactttgaagatgctgtatttaatgagaatataattatttacaataaaaatatagtggagtataaaagaaaagcgttaatatttaaagaactagtaaatgaaaatataaaacgagaaattaggcatgaaaaattttatgatggatttttaagactatcaggaaaagagcttaaaatcgtatatacaatcattaataatattacttcaagttttaatttgataagtaaacctaaggaattattgggtagatataatgaagataagtttttagaattactaaatagaaatttagagaatttaaaaaacattaatgataatgaaataaagctaattttatattataaattaataagtttgtcaaatgcgccttatgggaagatatacaatagaagaaagtttgtacagacattggattacatggtagagaaagcttatgctgttttagtgacaaaaaaggattttaaagcaagagcaagaaaattagatgcaataaatgaatattatatgaatagaactatatcagcattaaaaaataaaggttcaaatacacatattacagaagagcttatagaaaagatttatgatataatcacaaaattaagacaaagaccagaaaataaagagaaaaggctttactatgaaaaactcgatttagatgtcatgacggagtcggccattaaagcagctataaaatctcaaccatatacatttctatatatgatagcagacttagcgagcattgattcatataaggatatgtctagtattatatttcaaattgaaaatttaattgagaaaaggtctttaattaaaaatttttctaatacctattttatggttctattatatttatctagcgatgcaatagttgtaagccaaaatcagcaagaagaattagtaccattagcagtgatgttaataacgagtgtaagtttagtctcagataatgattttataaatctggaaggttataatgatttggtcaagttatggaaacaaaaacagcaaaaatataacgatatctgtatgaagaaagaggaaaaggaaagtagcttagcactactaatgagagaaaaattagaattagaaattaaccagaaagaattatcagaagcctatgactcattattgagaaggtatggaagttacgagaatgaatttaaaaatctagttatgaattcagaaaaaagagttctattgccatcatatttttactatgatgatttgtgcaataaaaagaagctagcggaaaagcatatcaatgaatcaaaaaataaaatcggaacattgaaaagcatgttttctatagaggtttggaaggatcaagcgaataagtttattaatgaatccaatatgctagaagctgaaaagttgctaattaaagaagcaaagcaaaagccttactttaaaaaggaatattcagttttcttagaattagaagatcaaattcaaaaagtgaatgaatctatacaaaaaaataaggagatgctgagaagcaaagatgcactagttgataatataggaggcaaaattattgacttacagaagcagttaacgactatgaagaatgcgtatatagacatagaaagtggttactaaaaggttaattgtagatatattattatgatttactaagtgttatattattttgcagaaagagcatgagtctaggctcagtaagaaaattgtgtaaactaaaaaaatgaggatgccttattttcaagggcatcctcattttttatataaattttatagttctttattttctatttctttaacaattctctcgataaacgcatctaatttaacagcgccttcatcgtcattctttctgcttcttacagatacctcattattagcagcttccttttccccaacaactaaaatgtaaggagttctttcaagtctagcttctctaatcttataaccaattttttcagctctataatcagtttcaactctaatacctttattctttaaggcttttgtaactgcttcagcataatcattgtacttatcagagattggtaacactttggcttgaactggagataaccatgttgggaaagcaccagcgtattcttctataagcatagctaaagttctttcataacatccaattgatgatctatggattatataaggacgtttcttttctccgtctttatctacataactcatatcgaatctttcagctaaagcaaagtcaatttgaactgtaaataaagtatcttctttaccatgaacatttctaaattgtaaatcaagctttggaccatagaaagcagcttcatcatcagcttcaacataattaatatttaagtgatctaggatatttctcattgtatcttgagttttattccaagcatcaggatcattgatatatttttcagtattatttggatcccatttagagaatctataagttatcttttcagcaattcctaaagttcccattaaatattgaattaattcaagaacgcccttaaattcttcttctaattgctcaggtgtaacaactaaatgaccatcagctaaagtgaattgtctaactcttataagaccatgcatctcacctgaagcttcatttctaaataaagtagaagtttcaccgtatctgagtggaagatctctataactgtgttgttcagcattataaattgtatattggaatgggcaagtcattggccttaaagcaaatacttcatcgtccttttcttcatcacctaatacaaacataccatctttgtaatgatcccagtgaccagaaatcttatacaaatcgcttttagccataagtggagtcttagttaaaagataacctcttttttcttcctcatcttcaacccatctttgaagaagttgaactatttttgctcctttaggcattaataatggaagtccttgacctacattttcatcagttgtaaatagttttaattctctaccaagtttattgtgatctctctttttagcctcttctaaagcttctaggaaagcatctaagtctgatttctttaagaaagcagtaccatagattcttgtaagcatcttatttttttcattccccttccagtaagcaccagcacttctagtaagtttaattgctttaactgattttattgacataagatgaggaccagcacataagtctgtgaaatcacccattttatagaatgagattatttcattttcaggaagatcgtttattaattcaactttgtaaggttcatccttcattaattctaaagcttcatttcttggaagctcaaatctagatatttctggattttccttaattattttttgcatttctgcttcaagtttttctaagtctgcagcagtgaatgcactttctctatcgaaatcatagtagaagccagttgcaattgaaggtcctatagctaactttgtttcagggaataatctttttacggcataagctaaaacgtgagatatgctatgtcttagggcatctttaccttcttgagagtcaaatgtacatatgcttaattcaacatcttcatttatttcttttctaaggtcttcaacctttccattaactataccgcagcaagcatttctagctaaaccttcgctaattgatttggcaatttcataaatagataaactggcttcaaattctttaattgatccatcttttaaagttacttttatcattttaaaactcctttcaaatttaaaaaaattttgattctgtgacttgttaaattttaataataatatctttaagaaaatttattactaaaatcatacatttttgcaaacaaaaaaacctcatctctaaaaatagagacgaagtaatatccgtggttccactctaattacctagaacagactgattaaaataggtcaaataaaataaacattaaaaacctttttaaaaatcagttaaataggtcacttgaatttatcgtaacgtgataattacgggctttattagggccactcagaggtggttttcagtctaaatttatataagaataatcgcaccaacatattctctctctgaaaaataagattttagcttactgtcctcatcaacgtgtttatttattatattaatattcttaattataagcacatggtttttagatgtcaactaattaacaaaaaaaatacaaaagatattaagaatctcagaatatattggatattttaacaaaattataataaggctttaacctagaatttattaaaatcaaataaaatttatgtatattaggttgtatttagtatttttttcaggaggtaaagatgaatagaagtattaaaagtattaaagttaaaattattatgttcctaataccaatgttattaattgcatttatagctttgtcgggaataggatatagatttgcaagtaagtcattaaaagagagcaacttaaatgtaatggaagagatgacgaaaactgctgcatcacgagcagatgatcaaataaaaagtgagattaggaaccttgaagtaattgcaagcaatccgataataacggataagaatgtgcaaatagaagaaaaaattcaaatacttaaaccagcattgaaaacagttggacaattagaaatgagcataagtgataaagatggaaattcaatagatactttaggaaataagaaatcaataaagacaacacaaagttttatgaaatcaataaatggtgaaaattcaataaccaatccatatatagatccagtcacaaagaaaaaagtcatatcatattcagtacctatcaaggattcttcaaatagtattataggaattattacctcgataaaagattgcaaagattttgcttctttaaacaaagaaactaattttttgaaaacgggaaatttattaattgtagatagtaatggtaattttatagtttcagaagatgagagcttggtaaatgagaataaaaatataaccaatatgacctctgataaagaaaatttacaagatctaaataacataggaaaaagtatgacaattgggacccaatctggaacaggaaaatatacttatgagggtaaagaaagatatatatcatatagcccgatagggaaaacaggtcttgccataggaatcacagtagaagaaaaagatctactaagtgcattaaacagtttagcttttattgatattatagtgactgttattatgacgctactaatattaactattataataggctttacaattatagttgtaaacaggttacttggggcgaagtattatgtagatagtattgctaaaggtgatttttatactaaagttgatgataaatatactaagggtaatgatgaaataagtgaaatatgcctaagtgtaagccaagctaaagagtcagtaggaaagatgatagaggcagtaagagaggattcaaatatagttagagaaggttctgtatcgttaaatcaaattgcagaagaactatcaattcttacagaggaaatatcagcatccataggagaggtttctaataatactaataaacaaagtaatgactttgtacagataagcactaagcttgaaaactttggtgaaaatataactgaagttaagaataatgttcattcaattaatgaagatattgcaataataaatgataaatctttaaaaggaactaaagacatagaagaattaaatggcggaattataagtgttaatgatagtttcgaaaagtttttaattagcatagagtatatacaaggtgatatgaaaaatgttaatgggattacgaatattatcaatggaatatctgaacaaataaatcttctagcacttaatgcagctattgaagcagctagcgcaggcgatgcaggacgaggatttagcgtaatagcattggaagtgaaaaagctttcagacaaaagtaaggagtctgcacagaatatttataagataataaatagacttataaatataataaataaacttgtagaagagtctaaaaatatggagagtgagttgcatgagcagaaggaaatgatttataatgcatcaagttcattttcagaaatagcacttctagttaaagaaatagcacctaaagtatctaatatagatagtgtgtttaataatattaatcacagcaaagatttaattgttgaaactgtatatgagttatcaggagaaataacagagacatcaaattccttggagcaagtaactaattcatcagtgcagcttgcacgacttgcagagaaagttaacagtagttctgatattttactagatagagcagatgatttgcttcaaaaagttaatcaatttaaaaccaaagaagaggatttaacaaaagataccgacatatctgaacaaaattcaaaagcaaataatcaatatgaaaaaaaatcatattccagtgggggaggagagttagacactaagaataagaggttagaaaaagcgaatttattaaataagtttgaagactcaatagatagttatcaatatgaaagaaatctagatcttgatttggaagaagaattaaaggaactatcaatgtcaccagaggaagaaattaacttggaatttagcaattgtgggacaagtgatctggatttatcactggcagaacactttgttgatttaagtgtatctccgctggaaaagttggaagtagatacatcaactaaagattttggatggggatgctctaagataacagaaattaaagaatatattaagcaaaaagatgaaggagaatgtccggaggatgatttaggaagatataatatatcatagtttgttatataaatatatctaaaaaatcataacaaatgtataaaatttaatattgatttaatatattgaatagatgtataatattggtaggcagatgtggcggaattggcagacgcactagacttaggatctagcgccttttggtgtaagggttcgactcccttcatctgcatcaataagcgggaatgactcaatggtagagtgtcaccttcccaaggtggacgttgcgggttcgagccccgttttccgctccagtaagaatataaagattaaattaaaataacaaatatctaaaacaaaaatttgttttagatatttgttattttaatttacacatggttactaagataaatttaattatataacataataagttaataattgtcttcaattaatttgtctaaagttaagttgacaatcatttcttcagagtaaaatttttcacccattattttgaatattacttctgattttttataaccttctttataaagctttaaatttcttgtaattcttttaagagtgtttcttggtatatttaattctaatgctagctccttaaaagaataataatctttttttagcatatcgtataatttattttgaagatctaacttatatctataatcaacttctttggattggtggggaccatattttcctctatgatgggaaggacataaatatttataatttagttctatatcaaagccaccttcacttctgtgaacaatatgatgtatatcagcttcggcattacatatttcacataaagacaatttttaatcctccttagaatctaccctatataaaaatatattaattgttaaaatttatttaaattaaaaaaataatagaattcttaatataataatatgataactgtaaataacttgacatttaatattataaagtaataaataagaaatatcaatttgaatatctataataaaagtctaaaattttgtaataaaataataaaatggggataatatattaatatgtatatattaaacaaatttatccaagaataaacaattatgagataaatgagttataatataattagagaacaaaagataactattaataatatattttataaaatattagttgggaaggtgagtaaagtgtgggaagtttataattcatttaattattgggaaaacgttatcagtaggaacaagacaataagaggacatatgtttatgcagaaaccaccaacagaaagaagtatttattttcatacccttatatttggaaacaataatggtataaataatatatggggatatttccctaatagaaagtgtttgattggttatcttcaatattcgttcttgcaggaagctttttataagtggatatatggaaaagaaaaattaattactaggattccacatttaactgttgataagatcattcgtgagggagaaaaactaaagaaaatagacaaagaagttgcaagtaatatgaggagagactatgatttcttaagtagcttatggaatattccatctgaaaaggctcaagctagattagataaattcccagcagagtttaataagaagtggatgggggataacacagaatttttatatataaaaattttcaagactccagaggaacttggagaatttgtaatttcatcttcgttattaacaaatacaaaagaagaattagaaaatagaataggaatgtctattgatgagtgggaagatatctgcaaaaatgcaataagtgatcctaataaaggagaagtattcagagagattctactaaaaaaattaagcgaagtattttaaaagattaatatataatttaaggagctataattagcagattagaatctgctaattatagctcccttttaattataaagcactataaactttgaatagtatatttttaaattatactttcaacagaagagatactttgagaagaaattccaagcatctcaccagtaaagccaaggccttcttcagtagtagccttaatatttattttattaatatctatattcagagcaattgaaatgttctttctcatattctcaatatgaggcagcatttttggtttttgagctattattgtagcgtctatgttgtttatggcatagccggacttaagaagtaatttacctgtttcttcaagaagtatgatactagatattccactaaatctactatctgtatcagggaaatgtttgcctatatcgccaagagcacaagcgcccaataaagagtctattatagcgtggataagaacatccgcatcggaatgacctagcagccccttctcatatggaatttctactccacctaaaattaattttctattttcaactaatctatgaacatcatatcctaatccaattctcatataatcacctcattatgtgttttattattttactattttaacatattatgaggctttttatataaataattatactaatttaaaatacgtctacgtttatttgttgacatgttgttcaaagagcttgttttgggtttaatataaaatttaatgttaaaccaagaaataaatctatttatatgaaaatgtataaaggttgttctacgtctttttacaaaatctacatatataatttttcctctcattaataatctccaaaatattgcttttaaattaaatttagataaagaaaattttatagataaatagctttatatgctataatatcatagtatgaagaacttatacaaagggttaatattttaaagaggtgttaattttatggaaaatttgggctttagtaaagacaaatatgtattttcatctatgccgtcaatgttcctaataggagatactgcagaggatattagaaaaaaacagatatctttatttataaatgaattaagctcatataatgttttacttaaagatttagtaaactttccgattaaagaagctgacagaaatatagctttaaatatagcttattatatagctagtgatgaggatttactaagaataatcaatgaaaaaagagttttaccgatagctaaaataagtaagttaactaggataaaatctgagattataaataaacttagggactacataatagcttattgcattataataactaattcaaattataaatttattcaagattatctaagaataaaattaaaagaagataataaagttgtaagcatttcaagtaaaaatcaacagctatataaagggatagtaataaaagcttttaaaaattcagcatatatattaacttcaaaaggagaatttttaaagataaagacttttaatagatcaaaggttggagatgtatgtgaaggaaaagaaaagaaagggattagggggtacaaaatacatatatcaatattactatttatattaatattgattggtagtggtataactattgaatataggacaacacaaagcataatagtgatagaaacaacttccaatataaagattcatattaataagtttcacaaagttatatatgcctattctcctacagataaaggaaaagaacttataggaaatattgatgttttgaacaaggatgttgatgatgctatatcggagatatttgaatacgcattggataatgaaatgttagatttaagtaggaaaacattaataacaattaatggacaagctttaaaatatggagagcttactaaaacaaataaatttatatacgaacataatatacctatagctataaataatgcaggaaatcaacaaaagttacccaaatactcaactgaagatagcaaagaagaaaaaaaataactctttatttaagagttattttttagtttgtgctaaaacttccttaaaagtatttatatcatattttgagctaatataaattctatcaagtttaagaatattatcatctctatcggagagtcctctcttagtagtaaatgctaacgtatagcctgaatttttagcggcgataacactatcatcattaaaatctccaaatggataggcaacagcttcaactttttttcctgttattgattccaaagtttcttttgattccttcaattcatttaattgcttatcatatggaagctgattaagtttgggatgactaacagtatggctttctatatctattccgtaatcagacatttcttttatagcctcttttgataaataataggaaccatctagatctgatgttatacaaaatattgttgctaccatatttagatttttcaaaattggaaaagcattgtagtaattatccatatagccatcatcaaaagtgataactatgctcttctcaggaattggggaattgtttaataagtagttttttagttcatctaaagttaatgttgtataaccctgattttttatgtactcaagctgtatccgaagattttctggagttattgtaacctcattctcagccggttctctcactgaatggtaatataatacgggaactcctctattgtcagtaattaaatttgaattattaaaagatctttcattttgaagtgtacttttgtctacattggaaggatctttttttaatatattttcagatccaacatgattttcatcaatacttgtattatcagaaccatgattagaagctatagaatttttataagatatattgtgtgttattaggtaaatagaaaacattacaaacaataagctgaataccaaaatacttaaggaagttttatttttgaaaagtcttttgtaagaaatgttccttggtggtaaagttccttttaacatgttgttattattcacctccttgtaattaaaacaaatataattttcttttataattataccctaaacttaaagaaaaactacaagacctaatataagtcatttgtgatatatattctaattaaaattctaaatctcagccttaattgagcccttagattaccaggggggcaaatgtaaatttattattgaaggatattatataaaaaatttatttttatagagttttagcggaataacttattgaaaaaagtagcataatataaaaatagtacaacttactaacattatccacattcgcttgtggataaaatgttataaagctgttaacatacataattttacatgttggttttgtggatataaaatatattatgtcgcaaaatgcataaatcagggaggcgctaaaatgggtattatagctaatataacagggctattaatagtaagttcaatgttatccactgcttgtccacaggaaatgtttataactaataaaatgcaaagtgaaagcaaaattaaaattgtggataaatctataactaaaaatctaaattacttaaaattagacataaatatgcctcaattagtaggtggaaatgatgaaaaaagaataaatttgataaataatgtaattaatcaagatattttgccaagagctgaggagtccgaaaaaacggcgaaagaatacttcggagaaaagggacaagaaaccccaagatttccatatgaaatttattcaagatacacaacctcagaagataataatcaaattcttagcctatataatgactattatgagtttcttggtggagctcatggtatgacaacaaggacttcatatacaatagataagaagaaagaagcgctgctaactttaaaggaattattcagtgaaggatataattattctgacataataaataaagaaatagaaaatcaaataaaagagaatccagaaaattattttgattcaggtaatgtatttaagggcattagtgaaaatcaaagtttttatataagagacgataacctagtaatatactaccagctgtatgatatagcgccatatgtatttggaatccctgaatttaaaattcctctaaaactatttgataaggattttgtttattataaaaattgggattcgggaagcaagaagtagataataattttaattagataggtcattaaataataagctaattgacatctcatgatcaactttaacttatagacttaaaatagatagtaataaataatagaacaaatttaaataaaaggaatataaatagaagttaaatcatagcaattcataaaaatataccatataggattatattatctatcctgtatggtatattctacttaatactatgatttaacttattgttactaatagtttttaattattataggcactagtgttttgatttcctctaaatccataaccatctgaaattattctgcctattccagttaccttaccagttatgcatcctctgcagtgtgcaggtgtatcgcctgtacatattttacctggatataatgcataaagctttctatattcaccttcagtaacgttaggcattacaacattagcaccgctttgaagtgcaactattcttccgtttggagttaaagattccattgcggttgttgcaggaatatttatatcaggaagtattaatctggttaaagccataacctttaatgctagagtaagatttccaccttgagcatcctttaaaggtgtatcttcatttggtataaatggacctataccaatcatatctgcattaatttctttaaagaaaagtatatcactagctatagattctaatgtttgatttggtagaccaactagaataccacttccaacttcatatcctaagtctcttaaattctttaaacaatttaatctttcctcgaagctcatgttaggatccatatcttcatagagcttcttatcagtagtttcaattcttattaaatatctatcagctccagcttctttaaatgctttatattcctcataagttttttcacctaaacttaaggttaaagcgacatttaatttctttatctcttttactatgtttgtcattctttctttagtaaaataatcatcttctccaccttgaagcacaagtgttttgtagccatagctaacagcctttttagcaaagtctagaatttcttcttcagttaatctatatctttcaagatttttattgtctctacgtaaaccacaataaaggcaatttcttttgcagatatttgtaaattctataagccctcttaaatgaacatactcccctaagtatttttgacgtacttcatcagcggctttaaatagttcttcatttatatcatcgctttgtagtaattcaagtatttcgtctttatttaactcatgtgtaattttagccttttcaataattttattcatagttcctcctaagttaaaagaaattaatagctaactgatattagtatactatacaatctaacaacataacaacatagtagtttgtgtaaaatatgacattcacattgaaacatatgttttgaatatatcccttgacatcaggtatacaaataaattaatataaacccatagaattagttaaatgaattgaactattttaggagatgaatattttgattgaaaaacattttgaatatatagcaaattatttatggcagcagtccatgaataatattaatttaattttatcaactgaagaaaagaagcagtttaacataacggactattattatttgacaacaatatataatatggaaaatccaaatctaggagagatagcagaaaaattaaaactgactaaaccagcaatatctgcattggctaagagattaataaaaaatgaactagttgaaaaagtaaaatcagaagaagatggaagaatttattatttaaaagttacgaagaaggggataaagataatagaaggcgacaatgcaatctataagcaattcgctaatttaataagtgaaattacgtcggaggagaaattagaggagctaagtattctttttagtaaggttgttaaagtattaaaaagtaaagaataatagaaaaaacaaatttttttagaaatttagttaaatgaatttaattaaattgtttgaattaatatgcaagaaaattaaaatctgaatttagaatcttatatcaaaataggagaagtgaaaatgaaaatattaaagcagttttttttagtcacagatattggttttatagtttactggtttattaccttattccatctgattccagagagcttgctatttaaagattacgaaaatcctattttagtatcatggaattggtcattcttaccgcttgatttattaatttcattaacaggatttattagtttgtatatgtattacactacaaatgaattatggaaaaaatttagtctgatttcgcttgtattaactttttgttcaggacttcaagccatttctttctggactatgagatatgatttcgatttattgtggtggatttttaatttgtatttaatgatatatccattattctttataaaaagtttattaacggatgctattgagtgaggtgtattatgataagttggatttatttaatttttgccataatatttgaagtttcaggaaccatatcaatgaagttatcagaaggttttacaaatataaaatatgcaattgttatgctaggtttttatatattaagcttaagcatgttaacattagctttaaagaaagtacaaattggagttgcatacgcaacctggtcaggcattgggataatattgctgtcagctatcgggattgtattttttaaggaatcgattaatctgcagaagacagtttttataggacttataataataggagtcataggattaaatttaacatctacaatacattaatatcaatataaaagaagttttgttagaggcatgtagaataggaaaaagaataatctattctatcatgtctattattttacgatttttggaaaataatagaatgatatgtactttattctcattgcaaatgaatatataatttatattttcattagattcattagcaatttttttgagatgggataaattaaatattattttcaggataaactatacacagtttgtttatagtaagtaaaactgccatacaaaagcagcttgagtatgaaaatttagaagataatgttggaggtagaaaatgagagttacgaatccagaagaattgacaaaaagaatagagcaaataagggaagcccaaagagaatttgcaaaattttctcaagaagaggtagatgaaatatttaggcaagcagccatggcagcgaacgatgcgagaattactcttgctaaaatggcagtagaagaaagcggaatgggaatagtagaagataaggtaataaaaaatcacttcgcagctgagtacatatataaccaatataaagatacaaagacctgtggagttatagagagagatgaaatgttcggaataactcatatcgctgaacctataggggtaatagctgcaatcgtgccaacaacaaatccaacatcaacagccatatttaaaacattgattgcattaaagacaaggaacggaataattataagtccacatcctagggcaaagaattcaacaatagcagccgcaaaaatagttctagaagcagcagaaagagctggtgcaccaaaaggaataattggatggatagatgagccatcaatagaattatccagaaacgttatggcagaatctgatattatactagctacaggtggtcctggaatggttagagctgcgtattcatcaggaaaaccagctattggagttggagcaggaaatactccagctataattgatgatacagctcatataaaaatggctgtaaactcgattttgctttctaagacttttgataacggggtagtttgtgcatcagaacagagcataatagctatggaatcagtatatgatgaggttctaaaggaattagatgaaagaggagcttatatacttagaggtgaagaaattgataaggtcagaagtataatattagattcaaagggatctttaaattcagagattgttggtcagtcagcttacaagattgcaaaaatggctggagtagagatatcagaagctgttaaagtattaataggtgaagttgaatcacctgaattagaagaaccattttcacatgaaaaattgtcaccaatattaggtatgtataaagctaaaacttttgatgatgcgctaagattagcttccagaatgatagaattaggcggatttggtcatacatcaatactttatacaaatcaaatggaatcagtagacagaatagagaagttcggagtagccatgaagaccgctagaactttaataaatatgcctgcatctcagggtgcaatcggggatatatataactttaagttagcaccatcattgactcttggctgtggatcttggggggggaattcaatatcggaaaatgtaggacctaagcacttaatcaatgttaaaagaattgctgagaggagagaaaatatgctttggttcagagttccggataaaatttactttaaatttggatgtcttccagttgcgctagaagaattaaatgcaatgaagaagaaaagggcgtttatagtaaccgatagggtgctatttgatctaggatacactcataaaattacaaatattttaagtgaaaatcatattgaatataagatattctcagatgtagaacctgatccaacattaaaggctgcaaagttaggtgcagatgcaatgagagattttaatccagatgttattatagctataggtggaggatcgcctatggatgctgcaaaaattatgtgggtaatgtatgagcatccagatgttagatttgaagacttggcaatgagatttatggatattagaaagagagtatatgaattccctccaatgggagaaaaggcaattttagttgcaatcccaacatcagcaggaactggatcagaagtaactccatttgcagttataacagatcaacaaacaggagttaagtatccacttgcagattatgcattgactcctaatatggctataatagatgcagaacttatgatgagcatgcctaaaggattaacagcggcctctggtatagatgctttagttcatgcaattgaggcttatgtttcagtgttagcatctgagtatacaaacggattagcgcttgaagcaataagattgacattcaaatatttaccagatgcatataatggaggagctacaaatattaaagctagagaaaagatggctcatgcatcttccgtagcagggatggcttttgctaatgcatttttaggtatatgccactcaatggctcataagctaggtgcattccaccatgtacctcacggaatagcaaatgcattattaatagatgaagtgattaggtttaatgcaacagatgcgcctagaaagcaagcggctttcccacaatataaatacccaaatgcaggatggagatatgctagaatagctgattatctaaatctaggaggaaatacagaagaagagaaagttgaattattgattaaagcaatagatgatttaaaggccaaagttggaattccaaagagcataaaagaatttggagtttcagaagaaaagttctatgcttcaatggatgaaatggttgagcaggcttttgatgatcaatgtacaggtgcaaatccaagatatcctttaatgagtgaaattaaagatatgtatataaaatcatataatggcagcaataaataaaaacgataaatgataaataaaaataaaagagctatatcaagacaatcaaataatcttgatacagctctttcgttaatctaattatataatctcaaaggtgttttatgcagctctcatagttgaatcattagcgtctctgtttctattcttttcattgttttcttcaataaaatctctaacaaccttaatagcttgtattattaaagttggaatgaaagcaaataagtgaactaacattaattcattagtagtgagtggagttatttcaaataatgtttgaagtgctggtataagtaaaactgcatttacaagtacaacacctgatataaaggcaatccagctgaatttattattgaacactccaagagcaaagatagattttttacctcggcagttaaatccatggaataatctagctaaacataaggtactaaatgccatagtcattgcaagcccatggcttcctgtagctaaaccaatatggtaagaaatcatagtgaatattccaatcagcaaaccttgacaggaaatatctattataaaatctttagttaaaatagattctttagcatccctaggtttatcttttaaaacatcttttttagatttttccataccaatcgctatagcaggtaaactatctgttaataagtttatgaataataagtgtactgcagcaaatggaacaggaagcgcaaatattgatgaatatagtactgcaagaattccagaagtattacctgaaagcaagaattttattgaattctttatattagcataaatgtttcgcccattagtgaccgatttaacaatagtagcaaagttatcgtctgttaaaatcattgaagcagcatcttttgaaacttcagtgcctgttatacccattgcaataccaatatcagcttgctttagtgcaggtgcatcattaacaccatccccagtcatagctacaattttacctttgttttgccatgctcttactattcttattttatgctctggagatactcttgcgtaaacggaaatgtgctttaattttgaattaagttcgtcatcagacattttatcaagttctaatccttctacagctaagtcaccttcttgcaatattccaatttctttagcaattgcagaagctgtaatcttgtgatctccagtaatcataattggcttgatagaagctttaatacaatcactaacagccgctttagattcttctctaggtgggtcaatcattgaaattaaacctaggaaagtataatcatattcatcatctaaagtgagttctttattttcattaagctctctataagcgaatgccaaaactcttaatccttgagatgataattctctattaacattatttatattgatcttatcattgttagtgaagtttgctactccatttgaagtttttattgaagttactctatcaagtaatacatcaagagcacctttagtaaccattatatattttccatcaattttatgaagagtactcataagttttctatcagaatcaaaaggaatttctttaagccttgggtaattatttctacattcaatttcatttaaagagtatttatgacctaggtttactaaggcaacttcagttggatctcctatctcagcaccatcttttgaagtagaatcgttacatagtatagaactagttaaaaggaaatttgaatcaaaatttttgaaatctattttagtactatcaattaagttgttatcaacgaagatctttttaacagtcatcttattttgagttaatgtaccagttttatcagaacagataacagatacacaaccaagaccttcaacagcttttagctttttaatgatagcattctctttagccattgattgtgtgcctatggcaagtacaattgtaactattgagctaagggcttcaggaatagcagcaacagcaagagcaacagcaaacattaatgaatctaatagatcaatacctctatacatgcttaatccaaatacaataacacagataccaattatcccaaaggccaacttcttagagaattcatccaaggaaatttgaagtggggtacttttttcttgagtttcttccataagggtagctattttaccaagctcagtattcataccagtattcgttacaagaacagtagcacgtccataagtgactagtgaactagagaaaaccatatttttttgatcacctaaagcaacttcatctttatcaataacatcagagaatttgtccacactttcagattcaccagttaatgaactctcattaactttgagagagaagttttctaaaattctaccatcagcaacaactaagtctccagcttcgagtatcaaaatatctcctggaactacagttttagaaggtatttcaattttgactccattccgaataaccttagcattaggcgcagatagcgcttttagactagctagagattgttcagctttaacgtattgaacagtgcctaaaatagcattcatagctataacagctaaaattacaaaagtactttccatatttccagtcatagctgaaattatagcagcagcaattaatatgattactaataagtccttaaattgttctagaaatacagataaaatgctttttttctttttttcatttaaggtgttttcgcctacagagtctaatattttattagctttttcgctcgtcagcccctttaaagtcacatcgaaggttttaagagattcttctactgttttagaaaaatattttttcattatggcatcttcctttcaaagaaaaaatttaataagtatataattagctaaagtctataaagtgaacattttcaggtagagtttaactctgactgaatttagttgaacatataccctcaagtggtacatcgtccagaaatatacagttgttatacccaattgaagaagagttgttactaatgatagatattggataaattaacaacaaaaaagacttttaatataacttcaaaaatttgaagttatattaaaagtctcgttacctgttagggtatataacaccagactaacaatatagtcgcgattgttgatgttatatttataactactcccttttaatgtagtgatttattttatgtaattattatagcattttatatagttttagtcaacacactaagagttatttcgtactatatattatttatatttcacaaaaatataaataagtaaattattgtttaaggtatatgtaaaattataactattgttatcatattggttaatatgtataattataactgcacacgttaacaatattatgttatgtatgtaattatatatttaagccatagggggacgttgaagtgagattaaaaaaagtaaaagatgtaaaaatcataaggagtataattataatagtaattttatctttgatatcaacaattactattggagttttgggttatttaaatacatctaaaatgtatgatgccaacttgacaatgtataataatgttattccaaaacttagtgattggggtgatgttaatggaagtatgggtgttttaagaaatactttaaccaaaataatagataggccatttgatgaagcaaatgaaaaaacaatgctagaattaaatacaaatataacagaaatagtgaataggcaggctaaagaatcagaaaataattcagaagaacaccaattagttatgaaatttaaagaagaatatgaacaatattattcgtacatacctgatattattgatcaaagaaaacaagatttaactccagataaaaagattacaaatgatgctatgggggtatatggaaatcaaattgctcaagataataaggcattggttcaacttcaaaaggataaagctacaaatgagattaataaatctatgagtgcatatagaaaaaatatatttatgtttataagtatattgagcgtatcaattctggctctagcgtttatgtcaacatatataatattcatgattaagaattcaattaaagaatttgtacataaagtttcaatcttatcagaaggaaatttcactgtaaagtttgatactgaatccgcaaacgaatttggagtgatgcagaatgcattaagcaagaccataacatctattgcatcaattatatatacagtaaaggaagattcgagccttgttacagaacaatcaatagagctttcaagggtttcagaaaaaatgaagcattatataggagatgtatccagttcaattcatgatatagcagaaggatctaatgaacaatctgaaagacttatgtcaataaacaataatttaagttcttttagtgataaattagattcaataacaagatctgtagagaaagtggataaaagcactattaatattagtaatgaagccaatattagtgatgaaagattgagaaatataggtatatcgataaatgaaattgcagaatcttataatgaagcacaaaggaaagttaataaattaagcctaagtgtaaataaaataacagaaataactaatatgattaatgaaatagcagatgaaactaatttgttagccttaaatgcagctattgaagcggcaagagcaggtgaagcaggtaagggattttcaattgttgcagatgaaattagaaaattagcagagcaatctaaaagttcatcagaagatattaataatttgctaggtgacataagttccgaaactaaattagttgaagaaacaacaggtattgctaacaagaaattagaggagcagattcgtacaatagcatcaactatagtttcatttaaagaaatagtagaatctataggtgatatagtacctcaagttcatgagataaatgatgcaatagttgatattaataatagaaaaaataatatagtagaaaatgtggaattatcatctgctgtatcggaagaaaattcggccgcatctcaggagatatccgcatcagccaatgaaatggataattcagcatataaggtatctaaatcagcagaagaattgaaagatataatgcagcagattacatctcaaattgagaagtttgttctttaatataaaaataattaaatatagataaatatcaatttatcatgggaatctctatgctgttaaaattatagaggttctcatttttattataaatttaagaaatttaagatatagcaactaagaataaacgacttgattaaaaaactagaaattccattgatgtaagtttttatgtgattaagtttattatttaagttataatatataatagtatttattgtgtatggaggtttttttatgataggacttgtacttgaaggcggagcattcagaggattatttacagcaggtgtgttagatgcatttttagatataaaggcagaaataaaatatatagtaggagtatctgcaggtgccactaatgcatattcttatgtctctaggcaaaggggaagaaacttagagataatggaaagatttatggataataagaggtatatcagctatagaaatttaattagatgtaaatctcttatggatttagaatttgtatttgacgagatacctaataagcattgtccatttgattataaggcgttttatgaatttgatggaaagatgttagcaggtgcttttaatattgagactggaaagaatgagtactttgataaagatttattggataagagaaattcaattcttagagcaagcatagcgataccattagtatttccatttgaaaagatagaaggacaatattacgctgatggaggcctttcagagcctataccaattaataagtcaatagaggatggtaatgacaaacatataatagtattaacaaggaacgaggggtatagaaagacaaaatctaaagccaatgaagtaacttataggctttataaaaataagtatccaaagcttgcagatgtgctaaaaaataggcatattaaatataatgagcaacttgattactgcaaagaattagaggaaagtgggaaagcatttataataagaccaagtataagtatggatataagtagatttgagcgaaataaaagtaaactaaaagcaatatatcaaaatgggtatgatttgattattcaaaataaagaaaaaatacttaaatatattggatagtatttaaatataatattttagagaagtattttcaaatagataaattatatatattatgaatgtttataaatagaatagaatgaattataaaatctacaaatgtaggattctagctgtttttgatgtataatgtactaataaaatataaaattttagacaataaagcgaacaagggagatatatatgtttacatccaatagcaaaacacctaaagtatatcatcaagttatagaacaaattaagaacaacataaaaagtggtaaattaaaaaagggagatagattgccatcagaaagagaaatgtcagaatctcttggagtatcacgtgcatccataagagaggcattgagagcattagaagtggtaggtcttgtggaaagcaggcaaggcgcaggaaattatataaaaactaattttgataattcattatttgaacctctttctgtcatgtttatgttacaagaaagttcaattgaagaaatgtatgatttaagagaaacgctggagcttcgttgtgctaggttatccgctaaaaatatagaaaataatgagctagagcttttaacagcaatattagatagaatgtatatagcagaaaatgaggacgagagtcttgaacttgatattaagttccattatttaattgcaaaaacctcaagaaatactttacttataaatgttcttgaagttatatctcagcttatggatgaattcattcgaaaatcaagagcgcaaattttacatacaggaaaaactagggagaatttattagagattcatgagaatttagtaagagctttgaaatgcagagatgctagtaaagctcataatgctatggtagagcactttgatttaattcgaggatcctatgggtataaaaaataaaaatatattgttttaaaaataagatggataaaagataatcgtcagtaaggttattttttttatccattttatttttgttatattttaaacaaaaaatgcttaaatacgattaattaaaaatataaattaaatttttaataaattttatataagcaaaaagatatagaatatgaggcactaaggagtatattggaatagagtcaatgtaaacattttctgttaaataaataacaatactttacaaactatattttggaaagtataattaaattgaaattggtcataccaattcgatattggtatgacatgttggaaaagaggaggaataaattagttttattgtgactctagcaaaaactattatatatagcggaataattaaactgatattggattttatcaaagaaataaattgaagtaatttttaaaagtttgtttattccacattgttttgacaaaactactactatcactttgccaatcagtgtttggaatttaaaatacagttttaggaggaagttatcatgaatattttagtttgcattaagcaggtgccaggaacatctaaagttgaggttgatccagttacaggagttttgaaaagagatggcatagactccaaaatgaatccatatgatttgtatgctcttgaaacagctcttaagattagggagagtgaaggaggaactgttaaagtcttaagtatgggacctaatcaagctttaagcgtaattaaggaagcttacacaatgggagctgatgaaggcacattattatcagacaggaaatttggaggagctgatgttttagctacatcgtatacaatagctcaaggcgtgaaaaagatgggggatttcgaacttattatttgcggtaagcaaacaacagatggagatacagcgcaggtaggatctgaaatggctgaatggttaaacataccacatgtagctaacgttaaggacatagttaaagtagaagactcaacaatcacagttgaaatggatatgccagaaagtattgaaacagtaaagatagcgtacccatgtctaatcactgtagataaaggaatttttgaaccaaggttaccttcttatagaaaaaaactttcaactaaggacagagaaataaaaatattaagcctaaaagattttgatgataaagatgagaagaattatggacttaatggatcaccaactcaagtagagagaatatttccaccagaggttaataatgatagagaaatgtggacaggcagttctggtgaattaagtggaaaaatgggagagaaattaaaggaattgaaatttatttaggtattaaatattagtaaagatatctcacaaagataattaaaggggagaatgcgttatggcaaagttagtagtaaatcaagagaaaatattagatattgatgagttaattaaaatatgtccttttggtgcccttgaaaataataatggagttgttgaaataagtggagcatgtaaaatgtgcaagctttgcgttaaaaaggggcctaagggagctgttgaatatatagaggaagaagtcaaagagatagataaaagtatttggaatggaataggcgtttatgttgatcatgtagatggagaaatacatcctgttacttatgagctaataggaaaggcaagagaattagcaggaaagataaatcatccagtatatgctgtatttatcggaagtaatatttctcataaagctgaagaattattacactatggtgtagataaggtatttgtatatgatgacgaggaattaaagtattttagaatagaaccatatacagctgctttcggagattttataaataatgtaaaaccaacagcgattttagtcggtgctacaactataggtagatctttagcgccaagaatagctgctagatttaaaactggacttacagcagattgtacaatattagatatgaaggaaaatacagatttagttcaaattagaccggcatttggtggtaatataatggctcagatagttactccaaattctagacctcaattagcaactgttagatataaagttatgacagctccaaaaagaaatgatgatatttcaggagaaatagtagaatgttctatagataaagaaaaacttttatctaaaattacagcgcttagtataaagaaaaaagatgctgaagtaggaataagtgatgctgaagtaatagttgcagcaggaagagggattaaatcagaaaaggatttagaattagtaaaagaattagctaaacttttaggagcagaatttgcatgtactagacctctaatagaggcaggctgggttgatgcaaagagacaaattggattaagcggtagaactgtaaggccaagacttattatagcttgtggaatatctggagcagttcaatttacagctggaatgaataattcagattatatatttgctataaatgctgatgataaagcaccaatatttaaggttgctcactatggagttgttggaaacttgtatgaaataattccagaattaatagaaaaaataaaaatggctaaggaggcataggtgatgagttacaaagaagttgaattaaaagattatgaatatatattatctatagcagagaatgatttggagagagttttctttagagaagaaataaatgaagactatagccatgatgaattaggcgggattaagaaaatgcctgatatagttattcaaactataagtgctgatgaagtttcaaaagtaatgaaatatgcctatgagaataatattcctgttactccaaggggatcaggaacaggacttgttggagcagcggttccacttaaaggtggaatagttatagaccttagcagaatgaataaaattttagaattagatgaagaaaaccttactcttacattagaaccgggagtattacttatggagataggcaaatatgttcaagaatttgacttattttatccaccagatccaggtgaaaaatcagcaacaattggaggaaatataagtactaatgcaggaggtatgagagctgtaaaatatggagtgactagagactatgtaagaggacttgaggttgtattaccaaatggtgatatagtaaatttaggaggaaaagtagttaaaaatagctctggatatgcactaaaagatttaattgttggttcagaaggaactttaggaatagtaacaaaggctattttgaaattgttaccacttcctaaaaaggctttaagcttgcttattccttttgaaagtctcgaaagagcgatagagactgtgcctaaaataattaaatctaagtcaataccaacagcaatcgaatttatgcagagagaagcgatacttgctgcagaagaatttttaggaaaaagttttccagataaatcatctgatgcatacctattattaactttcgatggaaattccacagaagaaattgaaaaggattatgaaaacgtagctaatatttgtttagaagctggagctttagatgtattaatctcagatactgaagaaagacaagaatcaatatggtcagctagaggttgtttccttgaagcaattaaagcattaactactgaaatggatgaagttgatgttgttgttccaagaaatcaaataggaaagtttgtaactttcactcatgaacttgaacgtactgctaatataagaataaaaagctttgggcatgcaggtgatggaaatcttcacatatatatattaagagatgaccttgaccaagaagcatgggaatctaaattaaaagaagttatgcaaataatgtataataaagctaaagaattagatggccaggtgtcaggagaacatggaataggatttgcaaagaagggatatttaaaagaatcacttccaagtgaatgtattggaataatgcaaggaattaaattagcttttgatcctaagaacatattaaatccaggaaaggtatgtgaatagaataaaaaagtatttaatttgaatactagcaaattataaatataagtaatttaactgagctttatttacaaatcaaagctgtcttaaaatagaaatttaatttctattttgggacagcttatttttatacataaaaaagcaaactcataacaatatacctttttatgtataattaatttatagctaaagaataaattaatacagaagaattataaaatgtcattgagatttataaattatagttctcattaaaagaaaaaattaaaatgaataaaacctttttactaaattaatcctcttatattataggagctccaaaaggaagagaggtgcaaagatggatatagaagaaatagtaacgcgttgcaagctcggagagaaggaagcatttcgcgaactttttcaaattgtagaaaaaaaggcgttggctactgcatattttttatcaggaaatagaggaattgctgaagacatacttcaagagacatatatgaaatgcttcatggaaataaataaacttcaagagccacaagcgtttaaagtatggttttttaaaattcttatgcgaacaggctggaaaatgacaaaaaagcggtcagagttagttccgttagaaataacatcagaaaatgaaggtttattttttgatgagaatcaagaaaaagaaaacataattgatagatatgagataaaacatgtaatgcggagtgcaatcaacaaattaagtcctaatttaaaaacagttgttattctttattattacaatgacatgacaatggaagaaatttcaaaggttacaggttgttttaaggccacggtaaaatcacggttgttttatgccagagctgctttgaagaagcagttagccaattgctttgaggtggaaagtgggatgagcatagttaaatagaaaggagtctaattaaaaatgaaagataagggttatttggataaggtaataaagagtgctatagatgatagtatttttaatattaaagcttcaagagatatttttaatgaggcttggaataataaggagaaagaaatgggaaagaaaaagtattttagtataaaaaatataagaaaggaggtattagttcctatatgctgtgtattatttgctattattggtgtttttacattttcaccaggagcaagggctgctgcgcaggaagcattgaagacaatatttttacttgataaatcaggtaatattattgagaaatcagaagatgaggcagttgatgatgttaccgttggaggttttgagacaacggataaaaacaaaaatgagatagaggggaaatttggatttgaatttgattttcctgaagaggttgggaatttctcgattacggaaattgcaggatatcctgtgtctccggtagcgatgatgactgttaaagatttgaaatataaagatgaagaaaactcattagataagtttagaaaagcagtaggagatgatcaaatatttaatgagcttagtaaagattataagattataagaaacatttgtgaatcatatgaagatagtgagaaacataaattttttatatacttatcaaaatttagtgaggattcagaaatgaatagtgttaaagaaacaactattgataatataaaatgtagagttttagaagaaaatagggctaaatatgaaagaagtgaaaatggcgatgatgtgacaaagaagcctattagtgttaacaaaatatattatatggtttgggattataatggagtaagctacaggatatacattggagaaaattctgcagatattgatgtagcaacacagtttgcaaaagattatataaagattctaaaacaagaatagaaaaaacaaagggtaagggagtgatctcttaccctttgttttgaaagggatatatgaactttaataaatataatataaaatctatgatttatagaataagttagtaaattgaacctttaggtgtttaagattaaataatcttctttaaataaatcaatattattttaataaaactgtatgaaataataaaaaatacattgaaaaataatttggaataatataaaataagaacatagtaataataaatgataataaataagcagaaaggagaaagagaaatggatgaattaataatgtctcaaagaattaaaaatttaaagcagaagatgttatctgaaaaaagatatgcatctatcgaacaagcacttataataactgaaacttataaagagaatgaagataagccagttattataaaaagagcattagcattaaaaaattctctttcaaaattagaaattggtgttgatgatgaagagttaatagtaggtaaccgtactaaaggggttagatatggtgttgtttttccagagagcggtagctcatggatcgataaagaatttgaatctctaccaactagacctcaagacaaatttaatgtgaatttaaatgatatagaaacatttcgaaaagtgattaaaccatattgggatggacactcattagaggatgtcattagacagagatatggaaaagaaattgatgaaattgcaaaagtggtaaaaataaatcaaaaagaccatgctcaagggcatatttgtccaaattgcagagagtggcttgctttaggcccagaaggaattaagcaaagagccattgaaaaaatgaagaattctacaaaagaaagtaaggaattttatgaaagtgtaattattgttatggaaggtgctcaagaatttatgatgagataccatgacttaatgaaagaaaaagctgagtcaatctgcgaggaagaattagtagcagatatgcttcaagttgcagagatttgtaagaatatctctagaaggccggcacaaactttccatgaggcggtgcaagcaatttggtttttatttgttatacttcatatggaatcaaatgcatcatcattctcaccaggaagaatggatgaatttttatatccatattataaaagagatatacatcttggaaatatagatgataaaaaggctttagaaataattgaatgtctttggcttaagtttaatgaaatagtttatttaagaaattctcatagtgctaaattttttgcaggatttcctataggatttaatattgcaattggtggccaagatgaaaagagtaatgatttttcaaatgaattatctttcttattcctaaaagctcaagaacatttaggtctgccacaacctaacttatctgtgagacttcataagaacacatcagaaaaactattgaaagagagcataaaagttgtggcaaaaggcagtggaatgccgcagttctttaatgatgaatcagtagtgccgtctatgatagacttaggaattaaagaaaaagatgcaagagactatgcaattgttggatgcgtagagcttacaactcaaggtaataatcttggttggagtgatgcagcaatgttcaatttaaataaggttttagagatcactctaaatggtggaaaatgcttaatctcaggagattcattgtctcaagacttaggtaatctaaccacttacgaaaagtatgaagatttagaggaagcatttgctaagcaaatagattatttcattgatagaatgattttagcttgtgaacaagttgaaaaagcccacatagatgttttaccttcgccattcttatcgtcagttattgacgactgcattgagaaaggtgtagatgttactgcaggtggagcagtatataatctgtcaggaattcaaatgatacaagttgcaaatttagcggatagcttggcagcaataaaacttttagtatatgatgaaaagagaatttctaaagaagaattgttaaaagctcttcaaaataactttgaaggatatgaagtgataagggctatgctattaaatcgtgcacctaaatacgggaatgatattcaatgggtagatgaaattggtgctaagtgggcaagatatttcaatggaaagcttaaatcttatacaaactatcgtggaggtaaatatcatacaggaatgtatacagtatctgcccatgttccaatgggtgaaaatgtaggagcatctgcagatggaagatatgcaaaggcacctttagctgacggtggtatgtcacctgtatatggaagagatattgcaggacctactgctgttttaaagtctgtatcaaaattagataatgtattaactactaatggtggtttattaaatatgaagttcttacctgagttttttaagcatgagattggacgggataagtttgcaagattcttaagaacctttgtagatttagaaataccacatattcaatttaatgttttacgtaaagaagatttattagcagcacaaaaggatcctgaaaattatcgtagtttaactgtacgtgtagcgggatatacagcatatttcactgaacttgcaggagaattgcaaaatgaaattatagcaagaacaagttatggggatatatagcctatggaaaaagattattcgtctttaacaggaaagatttttgatataagaagattttcaacacatgatggagagggaataagaacaacgatttttttaaaaggatgtccgcttaaatgtgtttggtgtcaaaatcccgaaggtatttctccaaaggaacaattaattcattttgaaaataaatgtattaattgtgatctatgtattaaaaaatgctctaatcaatcagttatacgagaaaataataaaatatgtgttgttcaagataaatgtatagatgaacaaaatgaaattgttacagatatttgtccgactggtgcgttaactatggattctaaaaattatactttagatgaagttatagaaatagcactgaaggataaagcgttttttaaatacggtggtggggtaactttatctggtggagaaccattgtaccagaaagaatttgtagttgtattacttaaaatgttaaaagaagctggaataaatacagcgattgaaacatctttattcgtccctactgaatatataatggaagcgctaccgtatctagatacaatttttgcagatttaaaggtatttgataatgataagcataagatttttactggcgtaggtaatgaactaatcaaaaagaacatcaagtttattttagaaagcaataagaaagataatgtgattatcagaactccattaatacctcaatttacagcaaataaaattaatattcatgatataagtggatatatttcaagcatttactcaaaagtaaggtatgaactattaaattataatccacttgcaaaatcaaaatacaacttaatcaataatttagattattgttttgaagagaatcctaaaatgtatactgagactcaaatggaggaattttatgatatagcttattcagcaggaataagaaatttagttaagtagttgtttcggatattcattgattgctgaataaaaaggtataaataaaaatgtttttattttaaaattctaaaattctaaaattcttaagaatatatattgtttagaatattacaatataagaatatatattcttggaatagagtattgttttatagtatttataacgcatttacttaatttaagcatagaaattaaaaagagagagggagaagaaaaaatgttaatgttaattgatgatgcaaacttagatgaaattaaaaggatttatgaattttacccatgtgatggggtgacaactaatccatctattctaaaaaaacaaggtggaaatcctatggaggtattaaaagcaattagagaattcttaccagaaggggcacaattacatgctcaagttgtatcattaactgctgaaaaaatggttgatgaagcacaacatatgattgaagtacttggaaaggacacttatattaaaattcctgtaacacctgaaggaataaaagctatgaaattattaagtaaggaaaatgtaaatattacagcaacagctatttatacttcgatgcaagcattcatggcagcaaaagcaggggcaagatatacagcaccttatgtaaataggattgataatatgggagctgatggagttcaagttgcaaaagatattcatgacatgtttaaaatgcatggattaaattcggatgtattagctgcaagcttcaaaaattcacaacaagttttgaatttatgcaagtatggaattggatcagttacagcagcaccagatgtaatagaaggattaataaaacatgatgcaactaaaaatgcagtagatgtatttacaaaagatttctatagcttggttggtgaagggaacacaatggaggggctataattcaggaagaagaacatttaagggaaataatttattgttctttttactatagactcacacatacaaatattttgacatataatgaactagtatcattacatggagttgaaaatgcgtgatatacgggctgattttagctggaggtaagggcagtagactatatcctctatcaagagccgatcaaccaaaacaatttttaaagctaattaacgataaaagtttcttagttaatactgttgataggataatgccattaatagacagggataatatttatattgtaaccaatatggactacaaagaaaaagttaaggatgaactaataggaattagagaggaaaatatttttgtagagcctgctaataaagaaactgcaacttgtataggtttgtctgcagtaaaattattaaaacaagatgctaatgcagtaatggttgtattaccatcagatcactatattcagggtgagaagaattatatagatactttatcacaagcaatagagatggcaaataggagaaggtgtatcgttacacttgggattgaacctagtagacctgaaacaggatatggatatatagaaatgggggaaagaactgctggaagcataccaacttatagaattgcaaggtttacagaaaaaccaaattcagaggtagctaaagatttcatattaaaaggaacttatttatggaattctgggatgtttatatttagggccgacgttatactaagagaaatagaaaaatacttgcctaaattgcataaatcactgatggagatatataaaaatttaggagaggaaaatgaagagagtgttataaaagaccaatatgaacttatagacggaatttctatagactttggagttatgcaaagaactagaaaagcctatgtcattaaatgtgattttagttgggatgatatgggaagttttggcgctttaagtaggctactgagcacttatagaaataatagtatatctaagaatgtttatattgacgattgcgagaattgctccatatttggggacaaaaacctgataattgggtttggaataaaagacttagttgtagtagatgctggagatgttattcttgtaatggataaaaataaggatcaggaaataaaacatttattaaataggctcaacgaaaataaagaatataataaatttctatagtaagtaagctgtttcaatatatcttaatgatactgaagcagcttatttatctttggagatgcacttagaaaccatatgaaatgtatgcttaaactatattaaactaatatttttactaatatagtttaatacgttatgagatttgatattcttgggtattagtacatataatacttgaagaaatcgattaataaagtgttgtaaatttgaatctagagtattattataagtatacaaaacaaatttaatttataaaaaataacgaaacgcctaaatgagggtttcataaaatataaaatttaatatgcagaggatgtgatcaagcattgatgatcaatactcacaagattatggcagaaaatattataaaatatgctaatacaaagagtatttatttaattaataataaaagatttatatgggggaacgtgaaacctgattgtgcgcctaaatataaatttaagaagcattattttaatgaaagtataaatatgattattgaaaagattatacatttatcatcattatcattggaagaaatatactatgatatgacaattggtaagtttagtgaagagcttggagtaatatgtcactttttatgtgattttttctgtgcaccacactattatagatgggaatttaagagtacgagcgctgtaaaacatcatatgatgtatgagaaaaatttagctaaggtagctaagtcgtttgatccgacaggaattataaatacacatgtagattcaagtaatatagaagagtttataatgcagctacagaagcaatatgatggaactataaattattataatgatttaaccttttcgtattatgtttgcgatagcgtattaaatatgatattgaacaatgtgtttatcaatgaaaataaggtaattaaagtaatttaatttcttaagataagaaatatttcaaaatggttgaaaaattattttgaaatatttttttgattttgttaaaaggtataaaattttataaagatattatttaatataaacaaaaatcacaatgttaaaataaagttcttgaacacatgtttaagtattgatattgttattatatagaaaaggttaaaaataaagcggtttaaattaaaaaaagtggtcaaaatataaaaaagtaaattttcatagtagtgagttttctagagacttctgttgcttatcaagagaaattttaaatttataggcacttttgaataaataatttaattaagcttgacataaaaatatagaaatatggtagaattataaattatagcaattaattaaaatttaacaatgtgaatataattttaaaattgattgttaataaatagactaatcataattactaaaagtctaaatagtagttatataatttaatttgatataaatattatagggtcgaaaaatataaaagtattgaaataggagaaagtagatatggaaaagcataaaaatatatcgatggcagttatcaaaaggttgcctaagtatcatagatatcttgaagaacttatgaaaaatgaggtggatagaatttcttcaaaagaattaggagaaaagattggatttactgcatcacaaattagacaagatttaaattgttttggagattttggacaacaaggttatggatataatgttaaggaactatatacccaaattagcgctatattgggattagacagaggttatgaagctgcactggttggtgctggaaatatagggcaagcagtttcgaattattctagatttgaaaatttaggatttaaaataacagcaatatttgatgcaaatcctaaattaataggaatgaaaatcagagatgtagaaataatggatatagacgaaatggaatccgtactagaagaacataaaatagatattggtataatttgcgttcctagaaaaaatgctcaagttgttgctgatgaattaataaggggtggagtaagagcaatttggaattttgctcctgtagatttagtagttccagatcatgtgaaagtagaaaatgtacatctaagtgaaagtttattgactttaatttatttattaaatgagagtgaaagttaaaaatataataaatatatgcaatatattatttaaagcttgttcaaaaaataacagattaaatatatatatttgtttttagaaatagatttaagaaaaacttatgcaaaagctttacatgaataaagttttcttctctgtttggcatgaaaatagatatatacctttgatcagttatttttttcatatacttaaaaacttatattaataacgcaatattttattgcaaataatctaggaacgtattataattttaattgaggcgtgaagtcttgatatttttttaaacttatttgttatattattaacaattaggataaaaaatatcaaaaatagtgtgaaaattaaaaaaataagcaagtttgaaggaggtccttagaatggaattaaaaaatgttattcttgaaaaagaagggcatttagctattgttacaatcaatagaccaaaggcattaaatgcattgaattcagaaacactaaaagatttaaatgttgttttagatgatttagaagcagacaacaatgtgtatgcagttatagttacaggtgctggtgagaaatcttttgttgctggagcagatatttcagaaatgaaagatcttaatgaagaacaaggtaaagaatttggtattttaggaaacaatgtcttcagaagattagaaaaattggataagccagttatcgcagctatatcaggatttgctcttggtggtggatgtgaacttgctatgtcatgtgacataagaatagcttcagttaaagctaaatttggtcaaccagaagcaggacttggaataactccaggatttggtggaactcaaagattagctagaattgtagggccaggaaaagctaaagaattaatttatacttgtgaccttataaatgcagaagaagcttatagaataggtttagttaataaagtagttgaattagaaaaattgatggaagaagcaaaagcaatggctaacaagattgcagctaatgctccaaaagcagttgcatattgtaaagatgctatagacagaggaatgcaagttgatatagatgcagctatattaatagaagcagaagactttggaaagtgctttgcaacagaagatcaaacagaaggaatgactgcgttcttagaaagaagagcagaaaagaattttcaaaataaataattttttaataattagttaaaaatctattagagatttatatatagtttgtatcaaataggtttaattaacaaggagggtaatttaatgaatttccaattaactagagaacaacaattagtacaacaaatggttagagaattcgcagtaaatgaagttaagccaatagctgctgaaatcgacgaatcagaaagattccctatggaaaacgttgaaaaaatggctaagcttaaaatgatgggtatcccattttctaaagaatttggtggagcaggcggagatgttctttcatatataatatctgtggaagaattatcaaaagtttgtggtactacaggagttattctttcagcgcatacatcattatgtgcatcagtaattaatgaaaatggaactaacgaacaaagagcaaaatatttgccagatctttgtagtggtaagaaaatcggtgctttcggattaacagaaccaggcgctggtacagatgctgcaggacaacaaacaactgctgtattagaaggagaccattatgtattaaatggttcaaaaatcttcataacaaatggtggagttgctgaaactttcataatatttgctatgacagataagagtcaaggaacaaaaggaatttctgcattcatagtagaaaagtcattcccaggattctcaataggaaaattagaaaacaagatggggatcagagcatcttcaactactgagttagttatggaaaactgtatagtaccaaaagaaaacctacttagcaaagaaggtaagggatttggtatagcaatgaaaactcttgatggaggaagaattggtatagctgctcaagctttaggtattgcagaaggagcttttgaagaagctgttaactatatgaaagaaagaaaacaatttggtaaaccattatcagcattccaaggattacaatggtatatagctgaaatggatgttaaaatccaagctgctaaatacttagtatacctagctgcaacaaagaagcaagctggtgagccttactcagtggatgctgcaagagctaaattatttgcggcagatgttgcaatggaagttacaactaaagcagttcaaatctttggtggatatggttacactaaggaatacccagtagaaagaatgatgagagatgctaaaatatgcgaaatctacgaaggaacttcagaagttcaaaagatggttatcgcaggaagcattttaagataggaggacttttagaatgaatatagtagtttgtgtaaaacaagttccagatactacagcagtaaaaattgatcctaaaactggtacattaataagagatggtgttccatcaataatgaatccagaggataaacacgctttagaaggtgcattacaattaaaagaaaaagttggaggaaaagttactgtaataagtatgggacttccaatggctaaagcggttttaagagaagcattatgtatgggagctgatgaagctgtcctattaacagatagagcacttggaggagcagatactctagcaacttcaaaggcacttgcaggagtaatagctaaattggattatgatttagtatttgctggaagacaagcgattgatggagatactgcacaagtaggaccagaaatagcagagcatttaaacattcctcaagtaacttacgttcaagacgttaaagttgaaggaaatacattaatagtaaatagagcattagaagatggacatcaagtagtagaagttaaaactccatgtctattaactgcaatcgaagaattaaatgaaactagatatatgaatgttgtagatatattcgaaacttcagatgatgaaatcaaagttatgagcgcagctgatatagatgtagatgtagctgaattagggcttaaaggctcacctacaaaggttaagaagtcaatgactaaggaagttaaaggtgcaggagaaatcgtaagagaagcacctaaaaatgcagcatactatgttgtaggaaaattaaaagaaaaacactacatctaagataataggagggtaatttattatgaatatagcagattacaaaggcgtttgggtctttgctgaacaaagagaaggcgaattacaaaaagtatctttagaactacttggtgaaggtagaagaattgctgatgaattaggagtaaatcttacagctttattattaggtagcaacatagaaggattagcaaaaactttagcagagcacggtgcagatgaagttttagttgctgatgataaaaacttagaacactatacaactgatgcttatacaaaagttatttgtgatttagcaaatgaaagaaaaccaggaatattattcgtaggagctacttttatcggaagagatttaggtccaagaatagctgctagattatcaacaggattaacagcagactgtacatcaattgatgttgatgttacaaatggcgatcttttagctacaagaccagcatttggtggtaacctaatggctacaattgcttgtccagaacatagaccacaaatggcaacagtaagaccaggagtatttgcaaagattacaactgatcaatctaaatgtaaaattgaaaaagttgatgttaaattagcagatagcgatgtaagaactaaagttttagaaactataaaagctaagaaggatatcgttgatatagctgaagcagatttcatcgtatcaggtggtagaggagttggaaacaaagaaaacttccaattacttaaagaattagcagaagctctaggcggaactgtggctggatcaagagcagctgtagaaaaaggatggattgatggagcatatcaagtaggtcaaactggtaagactgttagacctcaaatatatatagcttgtggtatttctggagctatccaacacgttgctggtatgcaagattcagatttaatcattgctgtaaataaagatgattcagctccaataatgaaaattgctgactatgcaatagttggtgatcttactaaggtagtaccagaattaatagctcaagttaaagaaataaagagcgctgaataattattcggttaatttagatatgtttttgttagattgtactattgaaagttaataatgtaacattaaagataattaattaacaatattattcaataagtaacaattagataattatgaagttaatccttagttaaaatatatattttagctaaggatatctataatgaaaagatttagaggaggaataatttatgaaaaagatttttgtacttggagcaggaacaatgggtgctggtatcgttcaagcattcgctcaaaaaggttgtgaagtaattgtaagagacataaaggaagaatttgttgacagaggaatagctggaatcactaaaggattagaaaagcaagttgctaaaggaaaaatgtctgaagaagataaagaagctatactttcaagaatttcaggaacaactgatatgaaattagctgctgactgtgatttagtagttgaagctgcaatcgaaaacatgaaaattaagaaggaaatcttcgctgaattagatggaatttgtaagccagaagcgattttagcttcaaacacttcatctttatcaattactgaagttgcttcagctacaaagagacctgataaagttatcggaatgcatttctttaatccagctccagtaatgaagcttgttgaaattattaaaggaatagctacttctcaagaaacttttgatgctgttaaggaattatcagttgctattggaaaagaaccagtagaagttgcagaagctccaggattcgttgtaaacagaatattaatcccaatgattaacgaagcttcatttatcctacaagaaggaatagcttcagttgaagatattgatacagctatgaaatatggtgctaaccatccaatgggacctttagctttaggagatcttattggattagacgtttgcttagctatcatggatgttttattcactgaaacaggtgataacaagtacagagctagcagcatattaagaaaatatgttagagctggatggcttggaagaaaatcaggaaaaggattctatgattactctaaataatatcatgaatatatggaaaaactcaagtttatgcttgggtttttttatttttagggaaatatataaataactactagattacataaataagtttaaattaaagaatattgtaaaattcaacaaaacattttattactgttaagtaagtgatataatatattaaataataactattttcttaagattaattgtataatttaattgaatattggatattaaaaaaataaatagttaaaaaatatgatataggtggtacacatcagaaaatgggcaatataaactgtgacataatctttagaaaaaaactttagtgtagaatatattatttaaagaagaatatatgaatgaaataagttaaaactaaggttgatatgatattatgtttatcaatgattttactaaaaagataaaaatatattttgaatattcataatcaaagggtagggttcatcaatatgcatattagattatgagatgatgcaaactaaataattttatactgtaagggagacggataataaaatggattataaatctgtagaattttatgataattatttaataataaaagaattaagaaattttaaattaaaacatatatttgagtgcggacagatttttaggtttgaagaggtagcagaaaatgattttattgtaattgcgtttggaagattaattgaagttaaagaagatggaaatgacgtaataatttataattctacaaaggaagattttaaaaatatttggcttaagtattttgatttagatagagattactcagttataaaagatgaactttcaaaagatgttttacttaaacaaagtattgaatttggatatggtgttagagtcttgaatcaagatccatttgaaatgttgcttagctttattatttcagcgcgaaataatataccatcaataaagaagactgtaaataaaatatctaataaatggggaaaagaaattatttataaggataaaacctactatgcgtttcctaatataggtgaaataaaagatgctacactagaagaaatacaggagacaggagcatctttcagaagtaaatatatttttgatacaataaaaaatgtatataattctaaaacagcaaaagaagacctgaaagcaaatgatgcaaatgaatgtataaagtatgatctagattatattaaaaatttagatgatgatgaatgtcacaatgcacttcaagaatttaaaggtgtcggttcaaaggtagctgactgtataatgttattttcaatggaaaagacttcagcattcccggtagatgtatgggttaaacgtgcgatgattcatttttatggggcagaggatgcatctctaaataagattaggatttttggaaggaccaagtttggtaaattagcaggttttgcacagcagtatttattctattatgcaagagaaaataagataaatgtagattaaaaaaaggttggtataaaatgaaaggtctaggattttagttcctagacttttcatttggtcaaaaaaatatcaaaacaacatgttctataatgttaataatttatcattgatgtaataatataaatatcatataaatcccttgatataactaatataaggtaaatgaacagatccgaaaagaagtggaaatgcaagaaaaaactttaactaaagtagttgagaaatatcgctatatacatatgaaaatagaacgtatattaagaaaatttagaaaatttaaattatataatatttgttataattttaacaagagtgtgctataattattttgtattataaatgtaagataaaaattattcatgggagagtgtgtgtaatgtttcagtttgagaatcaacttctagctttaaaacacgaggttcttactagagttgctgtattagcaaaagaaaataatattagtaaagaggaaatagaaaaaattccttatgctatgattgtaggagaagaacctaagtatagagattcagttgaacgagaaagaaatgtagtattagagagagcaaaacttgcagcaggatttaaaccaacaggcaaacatggacaagatttagttaatatagaagaagaaaaacaaatattatatgttataaaagaagcatgtgatagatgcccaacaaagaagtttcaagttactgatgcatgtagaaattgtatagctcataagtgtcaaagtgcgtgtaattttggagcaattacatatgttgatggaagagcttatatagatccagataaatgtaaggaatgtggaatgtgtaaaaaagcatgtccgtatgatgctgttgcagaagatatgagaccatgtaaaaaatcatgtccaacaggtgcattaagctataatgcagaagatttgagtgcggaaattacagaaagtaaatgtgtaaactgtggtgcatgtatgtcagcatgtccatttggagctatagaagacaaaagctcattagttaaagttattaatagattgatggataaagaagaaaaaatttatgctgtagttgcaccagcaataacagggcaatttgggcctaaaacaacttatggacaagttaagaatgcaattaaggcattaggctttaaagatatggtagaagctgcatgtggagcagatgcagttactgtgcatgaaagtaatgagtttgtagagagaatggaaaatggggatagctacatgacaaattcatgttgtccaggattcctaagctatattgaaaaaatgatgccagatcaagctaataagatttcagggacagtttcaccgatggtagcaacgggtagatatataaaatctaaagataaagatgcaaaagtgatatttataggtccttgcacagctaaaaaaagcgaggttctaatagaatcaataaaagatgctatagattatgcattaacttttgaagaattagtagccttattcgatgcgtttggagttgatcctacaacttgtgaagatatagtagttgatggagcttcaatatttggtagaaattttgctgtaggtggtggattgactgctgctatagagaactatgtacaagaaaaaggtgttaatattgactttaagccagtaaagatctcaggcggagcagaaattaaaaagactatgacaatggctaaggttggaaagttacaaggaaactttattgaaggaatgatgtgcgaaggtggctgtataaatggggcagctaaaattgtatcagtaatgaaagctaaagccccatttacaaaattaaatcagcaaacaagtactaagagtgtattagctaatacgacattaggcgaatacactgaaataaacttagaaagataatataaatcttgattttgaaatataattaagtaattaaaaattctattattatataggtgctctagcaatgaggtatttaggatttaaaattatttatgaaatttaagagctttattctttaatataatgtcataaaaactctaatcagtaatatgtttatttggttagagtttttttattattttaaaaattcataatattaataataatatggagaaaatttaagtaaatgcgatatattttgagataaggagtaatattcgctgaaaaatgggatataatattagaagtaatgtttgaattatatggatataaaggatattataattatgttagcactcgacaatgatgagtgctaacagaaaataaactgatatgataatatatattttaaggagggttttttcatgaacattaaaccacttggtgaaagagtagtaattaaaaaattagaggcagaagaaaagactaagagtggaatagtcttaactggtactgcaaaggaaagaccacaagaagcagaagtggttgcagtaggacctggagctgttgtagacggaaatagagtagctatggaagtaaaagttggagataaagtattatattcaaaatatgctggaacagaagtaaaggttgatggcgaagaatatactatattaaagcaagatgatattctagcaatagttgaatagttaaagtgttcataactagatatttaaatataaaaaacaaattcaattagaaacgataataaataacatatataaggagcgtgtgatataaatggctaagatgttaaaatttggggaagatgcaagaagatctatgcaaataggtgtagataaattagcagatacagttaaagtgactttaggacctaagggaagaaatgttgttttagataaaaaatttggtgcaccattaattacaaatgacggtgtttcaattgcaagagaaatagaattagaagatccatatgaaaacatgggtgctcaattagttaaagaagttgcaacaaagactaatgatgtagcaggagatggaactacaactgcaacattacttgctcaagcaataattagagaaggtctaaagaatgttacagctggggctaacccaatactaattagaacaggtattaaaatggctgtagataaagctgttgaagaaatccaaaagatttctaagcaggtagatggaaaagaagatatagctagagttgctgcaatctcagctgctgatgaagaagttggtaagttaatagcagatgctatggagaaggttggtaatgaaggagttattactatagaagaatctaaatcaatgggaacagagttagatgttgtagaaggtatgcaattcgatagaggatacgtatcaccttatatggctacagatactgaaaaaatggaagctgttttagaaaatccatatatattaataactgataagaaaatttctaacatacaagaaatattaccagtacttgaacaaatagttcaatcaggtaaaaagttattaatcattgctgaagatattgaaggagaagcaatggctacattagtagttaataaattaagaggaacatttacttgtgtagctgttaaggcaccaggatttggagatagaagaaaagaaatgttacaagacattgcaacattaactggtggaacagtaatcgctgaagaattaggcagagaattaaaagatgttactattgatatgctaggtacagctgatagtgttaaagtaagtaaagaaaacactgttatagttaatggtaaaggtgattctaatgcaataaaagaaagaattaaccaaattaaagctcaaatagaagaaacttcttcagaatttgataaagaaaaactacaagaaagattagctaaattagctggaggtgttgcagtaattaaagttggtgcagcaactgaaacagaattaaaagaaaagaaacttagaatagaagatgcattagctgcaacaaaggctgctgttgaagaaggaatagtagctggtggtggaactgcttatgttaatgtaataaacgaagttgcaaaattaacttcagatgttgccgatacacaaattggtattaatataatagttaaatcattagaagagccagtaagacaaatagctactaatgcaggtgtagaaggttcagtgataattgaaaaagttaagaatagtgaaccaggaataggatatgatgcattacatggagaatatatcaacatgataaaaggtggaatagtggacccaactaaggttactagatcagcacttcaaaatgcagcttcagttgcttcaacattcttaacaacagaagcagcagttgctgatattccagcaaaggaaacaccaatgccaggtgctccaggaatgggaatggacggaatgtactaaaatatataaattaaagagttataaatatttaatttaataaatagagaaagtgcttataagtactttctctattttgatttttagtattaaaaaataaagtgcttaatagccattaacatatctatgcaattttaaaaagtattttatattatatgtttaacctttaagcttatgaaaatcatagcaatgcaactttatacaaaatttatatactagaagtcaatattataaattattagagaatattttccatttattgtataaaagatttcctattagacataatttaaataaaaatattaataggagatggataatgaataatgatttctttatacattaaatgtaaatttagattcaaagatagtatgtcaaagaaaagattctgtaagaagagaaagagagaagcttttactttaattgaaatgattgcagtaattgcaattattggtattttagctgttgctattttacctaaagtaaatggctatataaatgaagcgaaaaaagttaaagttgtagatcagtgcagaaaagtaataatggccgttgaatcatataatttgaaaaatgattcgcctctaagtgaaagcactagtgtaagttcggctataagcaacaaagggattagtaagtatttagatggagttgaatttggtaatttaaatactagtagcacaagtttgaaaaattgttatgatgtagtaaatggtgcagaatttgatttcacagaaaatacagatattttaaatccgacgacgattgataatggatctaccaaagatgatgtaaaaaaatagaaaagatatcgataacaaaaaatttaacttacattattgaagtaaatttgcaattttagcttcaaatttattgactttagattgtacatacattataataattttaatttaaaatatagcacatttgaaaacttatatataccttgaatatggcaaggagtatctaccgggagccgtaaatttccgactataagtgatattagtataggctaaatctatagatttattagcatattaacatcacttttgaggttaatgtgctttttttgtacaaaaaaatagtacaagcaatgcaagcgaaaaatcataaaatactgaaaatgaaataaataattcaaaaaaataggaggaactataatgggaaaaataattaagactgcatatacttttgatgatgtattattggtacctaataaatcggatatattaccaagagaagtgagcacaaaaacaaaaataacaaagactatagaattaaatattcctttaatgagtgcaggaatggatactgtaactgagtcgaagatggcaattgctgttgcaagagaaggcggaatcggaataatacataaaaatatgactattgaagagcaagcaaaagaagtagatagagttaagagacaagaaaatggagtaattacagatcctatatttttatctcaagatcatcttattcaggatgcagagaacttaatggcacaatacagaatatcaggagttccaataacaactcaagatggaaaattaattggaataattacaaacagagacataatatttgaaacaaattaccaaagaaaaatttcagaagtgatgacaaaagataatttaataactgcttcagaaaatactactgtagaggaagcaaaagaaatattaaaaaagcataaagtagaaaagttacctttagttgatagtgaaggccgtctaaagggattaattacaatgaaagatattgaaaaagttagaaagtttccaaatgctgcaaaggataagaagggtagattattatgtggagcagcagtaggtgtaactggaaacatgatggaaagagttgatgcattagttaaagcacaagttgatgttataactcttgatacagcacatggacattcaaaaggagttttagatgctgtttcacaaataaagaaagtatatcctgatcttcaagttatagctgggaatgttgctacagcggaagcaacagaggatctaataaaggctggagcagattgtgttaaggttggtattggaccgggatcaatctgtactacgagagtagtagctggggttggagtccctcaattaactgcagttatggattgtgcagaagtaggtaagaagtatggagttcctataattgctgatggtggacttaagtattcaggggatatagtgaaagcactagcagcaggagcttctgcagcaatgatgggatcattatttgcaggatgtgaagaagcaccaggggaaatggaaatatatcaaggaagaagctataaagtttatagaggaatgggatctttagctgctatggaatgtggatctaaagatagatatttccaagaaggaaataagaaattagtaccagaaggtgttgaaggtagagtagcttataaaggctttgtctcagatactatattccaattattgggtggaattaaatcaggaatgggatatttaggagcaaagaattttgaaattttatatgaaacagctaattttgtggttcagacagcttcaggtcaaagagaaagccatccacatgatattaacattactaaggaagcacctaattatagtgtaggacaatagtaaaatgcacagttcacaatcataaaatataccacttatgtgaactgtgcattatttgattaatttataattatagagattatttaaattagtatttataattttcggtgaaaattgtctcaatttattgataaaaagatttatttagttgataatagaatttataagaagagtttaggaggagaacatgaaaagagatttagttttagttgttgattttggtggacaatataaccaactaatagcaagaagagtaagagaatgtggcgtttattgcgagattattccatatgactatactatagaaaagataaaagctaaaaatccaaaaggtataatatttacaggcggtcctaacagtgtttatggggaagatactccaactgtagaaaaagaagtatttgaattaggcgtgccagtacttggaatatgctatggtgatcaactaatggcacatttgctaggtggaaaagttgcgacagcaccagtaagagaatatggaaaaacaaatgtaaaagtagataaatcatctaaattatttgaaggaatcgaaactgatggtatagcttggatgagtcatactgattatattgaagaagctccaaaaggatttaaggtaatagcaactacagaagtttgtcctgttgcagctatggaaaatgaagaaaaaaggctttatggagttcaattccatgcagaagttgaacacactcaatttgggcaaaaaatgctagaaaactttatacacaatatttgtgggttagaaaacagctggtctatgggatcttttgcagaagaaaaaataaaagaaataaaagaattagttggagataagaaagtgttatgtgctttatctggtggagttgactcttcagtagcagcaatgattgtacataaggctattggtcacaacttaacttgtatatttgttgaccatggtttactaagaaaagatgaaggcgatactgttgaaagagtgtttaagaaagaatttgatatgaacattaagagagttaatgttgcagatagattccttggaaaacttgcaggagtatctgatcctgaaactaagaggaaaataatcggtgaagaatttataagagtttttgaagaagaagctaaaaaggttggtcaaattgattatcttgttcaaggaacaatttatccagatatcgtagaaagtggaactaagacatcggcaactataaaatcccatcataatgttggtggacttccagaagatatgcaatttgaacttatagaaccattaagagaattatttaaagatgaagttagggcagttggagaggaacttggcattcctcataaattggtttggagacagcctttcccaggtccaggtcttgccattagagttttaggtgagattacagaagaaaaacttgaaatagttagagaagcagatgctattttcagagaagaaattgcaaatgcaaatcttgatgaatctatttggcaatactttgcatgtttacctaatatccgttctgttggagttatgggagatgaaagaacatattctcatacaatagctttaagagcagttacatcaagtgatgcaatgacttctgaatgggcaagaattccatacgaaattttagatttagtaagcagaagaattgtaaatgaagttaagggagtaaacagaattgtttatgacataacttcaaaaccaccagctactatagaatgggaataaaccgataagttaaacaaaacatcgataagaatttagattaaatttgatgataaagcttagatactactgaatttttagtatctaagcctttttcgtatgttaagtggaaaatttgataatataaagtattaattatttattaatatgaatagagattattaataatagttattatttcatagaataaatccttataaatatattattaatgttagattgtctgagtaatctttttaaagcagtaaatacatattttctctaactaatagcaaataaagtacaacagcataatatattattagatagttattaagttttataggcaaatcaataatgattttatgttagcaatactttaactaagcgctttagcaatgattaaacgaaaattaatgctgattacgaaggagaggaaataatggaaaacagaaataatagaaattgcagacgttgtaattgtgaagaagaacgtggagagatggatagtagaaattgtaatccttgtggcaatggaactcttggagctaacgcaaataatgactgtttagctgatgcgttggaagatgcatataatgatggctataaagatggatatcgtgatgggtatgaggatggaaatactgcaggagaaacagcaggagagacagctggatacaagcaaggatattgcgctgggtatgaaaaagcaaaacaagaggtcttagattatattagaagaaatagatgttgtagatgctgttaagcagaactaaattatataataagtagttatataaaaaaggtgtttataagtgattgaaaaatcattgttaaacaccctttttatttaatataaatatggttatagtgataatttaaatagttcatattagataagagttaattaaaaagttacttttaatactaattgaatacaattgtgcaaacattttctctgtagaggaaaaagacggcattaatcgttatcattttataaagtataattacattaaagaaagggggcatcgaaaacgcttgaaaaaatcaacctttgaatataagatagtcataagattatactatgagtataatttttaaagacttctaaaatcaaagaacaacaagttaaagtaagattaatagcaataattttattttaatttaaatgaattaataagtattgattcttttcaaggaggcaaaaatgaagtatttttatactgaaaaccgttcgacaagaattttaaaattaattgaacgaagacattctatttctgttgacgccattgctgaaaaatttgaggttagttcaaaaaccgttaaaaatgatgtaaaagagttgaatagtttattaaaaggatctgcgctaattgataataagcaaggaatatataaaatttatattattgataatagcaaatttgaggagattaagactaatatatataaccaaaaagaatttcttaattcacctcaaagaagaatggcatttattttatataagcttatgaatagtgaagagccatatttaactgatgacctagcgtgtgagatgaatgttggaagaacgacagtaataagtgatttaaagaaaatgagagagatacttaataactacgatttaaaaattatagggaaaacaaataatggactagccttaaaaggtacagaattaaatataaggtttcttgtacttgagaacctttatgaaatgatttatggagaatacgaattagatgaagatgttattgatttagtaaaagagataacggatcaatatcagttcgatacaacgacatttgaatctttcatacattccctagttgtaactttagatcgccttttaaatggacatacaatcaatacattaagcgagaaatatggtgaattattaagaagttgggaatttacattggtaaatactatatcagatgcagttgaaaaaaggcttactataagtattccaattaaagaaagaattttcttagcattgccaattataggaatgaatactccgactaacatagaagggatttcaccgcatgttgaaattacagaagaagtatcaaatttagtaaatcatatattagagcgcattaaatatgacatgggtttaaatattacgctagatgatatattgaaagactttgtataccatatggcgttcttggtaaatcgtctaaagtatggggtccatattcataatcctatagtagatgagatcaggaaaaaatataaagtagcgtacaaaatggcagagttagcgcgagatgttattgaaaaaagtcttgatgtaaaaatgacgcaagatgaagttggatttatagcagcatattttggagtttttatttcagaacagcaaatagaaaaaagtaaaatatacaaagttgcagttatatgcggaactggaagagttacagctaggttggttgctagtcaattaaaaggtatttttgatgcgaacacagttatagatttgtattcagatagcacagttactagcgaaatactagataagtacaatttggttctatctactgtccaagctaactttaagacaacagctactgtaatatatttagagaaaatatttgatgaagaagcgctgaagaaaagaataaaaagtattaagtatatagataaattagacatgccatccatgcagggaatggattctatattactaagtattttagatgaagataccttctttattttggataatcaattgagttatttagaaaatgttgatcatatgattgataatctatactcaaaaggttatgtagacgatggatttaaggaaagaataagaaaaagagaagaaaaatctacgatggtttttaatgaatctatagcatttcctcatactatcaattatgaaaatgatgaaatagtagtcagtctaggaataattccagaaaaggctggagaaaacaatcaaagaaaactagtattcttggtaggacttccagaacaaactaaggatgatacactcttagttaaaatttatgatgaaattatagctattgccaatgataagaataccattgaagctctttcaaaggtaaaaagttataaagaattaattctacattttacaaaagaaaacgatatatttgatttataagtaggaggtttatgatgaatttttggtttttgattatatgctttggaattgcatttatactccaatatatactaacatttgctcaaatgaaaagtttcacggcttactatagtaaattgcgaagaagaggaagagttgccattggcaaagtgaaaggtggtttccgtgctggatgtattgcaatgtttgctatcgatcaaaatggaattatacttgaaggcggttatatgcaaggaataacagtacttgcaagggttaagaaactaaacggatttgaaggaaaagatgttggtagattaactcaagcagattgtaagaacttagctaaaccattaaccaaagcagtactagaagcctcttccaattataacgttattatgggcggtggcgaagttgtagaatctcaaagtccattacaaagattaggtaatatttttacagctaaaaaattaaaagctcacaattagaaaggagatattaatatggacgcaattgtttattttgcaaaaggatttatgtatttatttgaagttggtggaaatacatttgttagttgggtaacgggaattatcccaaaggtattattacttttagtttttatgaattcaataattgcttttattggacaagataaagttgatagatttgcaaagtttgcatctagaaatgttatattagcttatggagttttaccattcctatcagcctttatgttaggtaatccaatggcattatcaatgggaaaatttcttcctgaaagaatgaaaccaagctactatgcatcagcatcgtatcattgtcatacaaacagcggtatttttcctcacattaatgtaggtgaaatattcatttacctaggtattgcaaatggtattacaactcttggccttgatccaacagctttaggacttcgttatttattagtaggtttagtaatgaatttctttgcaggatgggtaactgattttactacaaagattgttatgagacaacaaggtattgaattaagtaatcaacttaaggcaaattagtttaggagggtattcatatggaaaaatataatgcaattaaaattgtaaaaggtagtggaggctttggcggtccacttacagtaaaacctgaagaaggaaaagatacattattatatattacaggtggtggagctgaacctgaaattgtagaaaagattgttaacttaacaggatgtaaagcggtaaatggatttaaaacatctgtaccagaggaacaaattttcttagttattattgattgtggtggaacacttcgctgtggaatatacccacaaaagagaattccgacaataaatgttatgccagtaggtaaaagtgggcctttagcaaaattcattacagaagacatttatgtatctgcagttggcttaaatcaaatttctttagctgattcaagtgcagagcctataaagagcacaaaagtgcctgaagaaggaaaaagagaatttaaatatagtgctgataagaaagtatcacaaagtttggctgaaaacagtaaatctagtattgtccaaaaaattggtatgggagcaggtaaagttgtaaatacactataccaagcaggccgtgatgcagttcaatcaatgattacaacaatattaccattcatggcatttgttgcaatgctaataggaattatacaaggttcgggatttggtaattggttcgctaaaatattagtaccattagcaggaaacggaattggacttatgattcttggattcatatgctctattcctctattatcagcattacttggaccaggtgctgttatagcacaaatcgtaggtactttaattggtgttgaaataggtaaagggactattcctccaagcttagcattaccagcattattcgctattaatacacaatgtgcatgtgactttattccagtaggtttaggtctagctgaagcagaaccagaaacagtagaggttggtgttccatctgtattgtattcacgtttcatgattggtgtacctagagtagcagttgcatgggttgcaagtataggattgtatcaataaactatgaaatttatttaattgcgattgagtggttcttatgaatcgctcaattgcaccaaggaaaatatattgttgatttagatgcaaggagtggaataaaaggaggtttatccatagtgaaactaattattgatgatgtaaatattgaaaaaataaaagatgttttcagcatattccaaattgatggggtaactagtaatccgagtattttgcataagtatggaaaacagccgtatgaaatattaataaaaatacgtgaatttattggggaaaactcggaattacatgtacaggtgatttctgaaagttcagaaggtatgcttaaagaagcacataaaattattaaagagctaggtaaaaatacttatgtgaagatacctgtaactagagatggattaaaggctataaaaattcttagaaaagaagaaattaatgttactgctactgctatatatactcaaatgcaagcatatctagctggaaaagcaggtgctcaatatgctgctccatatgtaaaccgaattgataatttgggagcaaatggtgttcaagtggcaaaagacattcacgatatttttgagaaaaataattttaaaacagaagtattagcagctagttttaagaattcacaacaagtattagaattatgcaagtatggaattggagcggctacaatttcacctgatgtaatagaaggtttaattaaaaacgattgcgtggatgtagctgtagagaactttaaaaaagattttgagatattatgtggtcaaggtaataccatgttaaattgccgataatctaagtagcttagaataaataataattttagaaagaaatatatttgaagggatgaaagcatctatgagtagtaagataatctatgaaaataaagtaaaagacttaggagatttagcagaaacattcttagaagaaggaatgataatattttttggagataatgcaccagatacactagcagattactgttactctattaatataaaggaagttaaagaaacaattaaacctggacaagtatttatgattgatggaatagcttttgaaataacagctgttggagatgtggcagagaagaatctagtgagtttaggacatataactgttgcgtttaatggttctaaagtacctactttatcaggaacaatttgtgtggagaaaaaagaaattcctaaacttaaaataggaagtgaactatctatattagcataattatatctaaaatttatatgaaatcgaaatgaataataaaatggcattaaataatgaagttaaataatcaggaggaatttttatgaaaaatacatggcttaacttagaaggaaaaacagcgattgtaacagggggagcatctggtattggtaaggcagttgctcaagagtttttaaataatggtgcaaatgtagttgtttgtgatatgaatccaaacaaacctgaatttgatgatcataatggacatatggaatatatagttactaatgttgcagatagagatagcgtagaaaaaatgattgagaaggctaaagagattactggaaccattgatataattgtaaataatgcaggtattaatattcctagattactagttgataaaaaagaaccaaaaggaaaatttgagctagatgaaaatgtttgggataaagttatgaatgtaaatgtaaaaggtgtatttctatgtgctcaagtagctgccagagagatggcaagtcaaggaaaaggggttattataaatatgtcttctgaaagcggattggaaggatcagaggggcaaagtgtctatgcagcaagtaagaatgcagtaaattctttaacccgctcatgggcaaaggagctaggaaaattaggtataagagttatcggagttgcgccaggaattctagaagctacaggactcagaactttagaatatgagacagcgctagcttatacgagaggaattactgtagaagagttaagagcaggatatagtaaaacttcaacaactccattaggaagatcaggcaagctttcagaagttgcagacttagtttgctatttagctagtgatagagcaagttatattcatggagttacttacaatattgctgggggaaaaacaagaggttaaataaaaaaagatattagtatagaataaatttaattatttggccaattagcacagaataaagttaaaaaattaacaaagttatctggattttaataattgaaaaatatataatttatattttataaagagaaaacttagttttctcttttaaaattttaaaaatgattgatatttaataaacaatgtattatggtaagtattaaaaataagttgataccaataaggataagatgaatattaattcatacaattagaaaaaatagaaccgagtaaagattaaataagattaatttaaggttattatttgatatattatttgtaaaaaagttaaaagcaaagatgagatattgagaatttatgatataattgaataataaaattatttttagttatatatggaggtaggatagaagaatgaataaaggtatatcactagacttatcaaaagtttctccttatttagaagaagcagaacttgaaaatatggaaagcatggttaaagctgttcatgaagatttacacaataaaacaggagcgggtaatgatttcttaggttgggtagaccttcctgtaaattatgataaagaagaatttgcaagaattaaaaaggcagcagaaaagattaaatcagattctgatgttttaatagttattggaataggtggatcatatcttggagctagagcagcaattgaaatgttgacaaataatttccataatgtattaggaagtgataagagaaaagttccacaaatattttttgcaggaaataatataagttcaacatatatggcagaacttctacaagtaattgaaggaaaagatgtaagtttaaatgtaatttcaaaatcaggtacaactacagaaccagcaattgcatttagaattttaaaatcatatttagaaaagaaatatggagtagaagaagcaagaaagagaatatatgcaacaactgataaagctagaggtgctttaaagacattagctgattcagaaggatatgaaacttttgtagttccagatgatgttggaggaagatttacagtattaacagcagttggattattgccaatagctgcggctggaatcgatattgatgaaatgatgaaaggtgctgcagacgcaagaacagcttattcagtaccatcaattaaagaaaatgatgcttataaatatgcagcagctagaaacgctttatataataaaggagcatcaattgaagtattagtaaattacgaaccatcacttcattattttaacgaatggtggaaacaactatacggagaatcagaaggtaaagaccataaaggattattcccagcagcagtagatttttcaacagatcttcactcaatgggtcaatatatccaagatggaagaagaataatgtttgaaacagttgtaaatattgaaaaaccaaaatatgaaataaacatagaagaagctgacaatgatttagacggattaaatttcttggctggaaagactatggatttcgttaataagaaagcatttgaaggaactttattagctcacaatgacgggggagttcctaatatgatattaaatgtaccagaaatttcagcatattattttggatatatggtttatttctttgaaaaggcttgtggaataagtggatatcttttagcaataaatccatttaatcaaccaggtgttgaagcttataaaaagaatatgtttgctttactaggaaagccaggatatgaagatatgaaggctgaactagaaaagagactttagtttaattatgaagattattattgatggagatgcctgtccaggcatctccattattgaaaaagcggcaaaagaacacaatatttcagtgataatttattgcgatattcatcattttatacagagtaattattctgtagttaaagttgttgatggtggatttcaaagtgtagatatgtatgtaatgaatgaaactaaagaaggtgacataattgtgtctcaagactatggtgtggctgcaatatgtctatctaagaaagcgaaagtaataaaccctaagggatatatatatgatgagaaaaacatagatagattattggaagaaagacatatatcacagaaaataagaaggggtggaggaaagacctctaaccccaaaaaaagaactgatgaagataatattagactggaaaaaaacttattaaaacttataactagttgataattttagaagcttagataagagcttctatttttatgctataaaaattataaatttatattttggatattattttaattatgactggaaggttttataaaaaaataaccttactaatatatgagtttatataggcatttatgatataatcaaataaaaaataaactgaagttatttacaaaaaatggtataaatgtataatataataataaggatcattttgagaattggtatgagaggagtatgaatttatggaggaacttcagttaaagtatgttgagatagcttttgataagcaaacaccgcaaaaagttggcacggagataaatatatctggtaaaatagatggggaaatagaaaacttagaatataaatttattgttggcaaaggtggggtttggaatactatacaagaattttcgggaaaaaattattgcatatggaagcctaaaagagaaggggagtatatggttatggtacaagccagagagagggatggaaaaaaacctttagactatttagccaaagaggactattctatagtgacagaggaagtgagtaatactgtggataaagagactagtattcaagatgttactaatgatgaagaaattaaaagcgcttgtaatgataaagaaagtaatttgctagcgtctgaaaaagaagatcctattttatgcaatattgaatttaaagaggcaatgaatagtatagaagacaatgtggtgttccttgaagttaaagaaatttctagagcagaaaaagaagtattaatatcaaatagctatgctgatgaagaaatatcatcttctaatgatgccaaagaagttgaagatatagtagataatactcaatataatgaagaagttctaaataaaatattaattgaaaacaatgatcaaatagaaccgagttttataaaagatatccgtatagataaagaggaaataaaagttggagaaaaatgttgtattgaaataaagacagatgatgagaatgtatatttatatagatactatataaaaaagaataatgaatgggatataattaaggattatgataaaagtaatatcttaaaatatacagcaaatgagtctggaaataaagaatttttaattcagtgcaaaagaatggattccactgaaacttttgaagaccatagaattatcacactaaaagtgagagaaattgataaagtagaaataaccaattttaaatgtttaaataactcattaatagcgggagaaaagcttggttttatagtagaaacaaatattgaagaatttgttagtaatgaagatattgtattactatataaattttataaaatatataaagatggaaaatcaatttgtatacaagactattcaactaaaaataacgtgtattataaggaaacagaagcaggaagctacagaatcctatgtcttgtaaaaagcatattttcaaataaagaatatgatgatagagctattttagtatatagtgttaaaccatataaaacgattaagattaataattttgtggctgattcgaattctcctaatataagtggaagtagtataaagtttacttcagaaatagaaggtggaaacaaagttatatatagatatcaggttaatggacccattaaagaggacacgggctttatagaaaagagtgaatttatatggaaaccatctgaagctggagaatatgacattatactttatgttaaggatattacttataaaggtgaatatgaggatttaaaaagaattacatttaatattgagaaaaagagtgaaaagccagtaaagattttagatattgtggttgataaagaaaagaagattattgtcggggagcctgttggtataacggtaaatgctgaaggtggaataaagctccaatatgcattcacaattagaaaagatggaagaaggttagagggtgtagattataataaatctaactggatcaattttattcctaaccaggcaggagagtatgaagtagaaataagacttaaggataagtactcagataaatcttatgatgcccaaacagttatatatttgaaggcgctagaatatctaccgggtgaaatagattatataatattgccttataaggaaacacatttgattggggaagctgtggaatttgaatgcattgttcaaaatacgcagaatactttattgaaatatgaaactaaaattaatggacattctattgagaaaacagagttctcaaaaaataaaaagttgagatttatacctaaaactgctggtaaatacactatagaagtttatgctaagaatgttaaatgcactagtgagtatgattctaagaagcagataaacttgtatgtaagtgaggcatatcctgtaatagaaactaatataatagcaaatacactagagggccatataaatgaggagcttacatttgaagctataagcagaggcgggaaaaatgtttgctatgaattttatttaatggagaataatgagtggagaaaggtgcaagcatatagtagaaagcattattatagctttatgccgtttactcaagggaaatataaaattttagctttagccaaaagttattataaaaaagttagttatgaggattatgctgaagtaacattttatgttaaaggtttaaaaggataactcgaaaataaacataggataaattttggagaaaggttgattaagtatggcgatagatggtttagataaaatgtcaaatgatcaattattagcaatgaatatgctaagcaatggacaagtaacaaatgattctgattctagcaatagcacgagtggtgaaaaagatttagcatttcaactagttatgaaaaatcttttggaatcatcaaaaaaatctaaagaaaatggtaatgctgaatcaaatgggaatacaaaggaagtaaaaggtgaaacaaccagcagtgagaaattaaattcaaaggagaatataaatttaaataatgcagctagagtaggacaaacatatgtaacaggacaaaacttagaggaaataccaatggttttaactaataattatataggttttacaagaaattctgaatctgcattatctaataaaagtggagctgatattaagaaaatatattcggctgtagatgatgcggctaaaaaatatggagtagatcctaatctaatattagctgtaattaagcaggagtctgattttgatcctaattcaacatctggtgtcggagctgctggattaatgcagataatgccagaaaatttttcacatttaggtataactgatggatatgatgttgagcaaaatgttaacggtggaactaagttgcttaaagaatatttagataaatacaatggaagttcagagttggctcttatggcatacaatggaggacctggaactatgcaaagaagaggtgtatcatcagcttctgacttatataaaatgccacaagaaactcagaactatgttccgaaggtaatggggtactatagagatggaatctagaatgttttacattctagattttttaaggaataaaataattataatcatataaaaactgcatcaaaaaaaccatcagtaatatttagatgacttttttcatgcagtttctttgctgtttgttaatattgttaacaatatgtacatttttaagttaaatttattttgttatcgtattcaaatgctaggtaaatgttttcaaaaaaccataataaaaaacgcaacccttggggctaggttgcgctttagcaataagcaataagcaataaataaaaagggggctatatattccttttatttatccttgcaagaatattatagggtattattattaataatgcaagtgatttaataaaaaatgtgaatatttttgaaagaaatgaattattttattgcaaaattatttaatattcgttaatagctctttaaaaggcttaattcttcatctgttaattctctatattcgccttcttctaaatctggatctaataataacccaccgaactcttctcgtttaagataagttaccttttttccaacagcttcaaacattctttttacttggtggaatttaccttcttgaattgtaagccttatttcagatccatcgttactgctcgataatatctcaagattagcttctaaacatttatacccatcatctaaagtaattccatccttaaaggcttttatatctttttcatcaacgcttttatctatttcagcataatatactttatcaacatgccatttaggtgaaatcaatctatggtttaattcaccatcattagttaataacaataatccaacagtatctttatctaatctaccaataggaaatgggtcaaaaacctgatgttctaggtttaataaatcaataacggtttcatctctattatcatgggtagctgatataactccatctggtttattcatcattatatatatgtatttacgatatagtacctcttcaccattaatttttataacagatttttcagggtcaacaagcatagcgctatcttttactattagaccatcaacttctataattccttttttggcaaaagatttaacatcttttctgcttccgtatcctaaattagaaattattttatctaatctttccaaattattcactccaatcgtttgtttgctttaatttatacattgatttattgtaccataataataaatatcttaacacatggatacataacttgtaatttatctacttcatttttagttttaataaaactaataggatttatacaaattataatatttataaaagaaaaccatgcataaatgaaattatttcatatgcatggctttctttcaatagatttatatccactgtacaatagaatttaatggctgtcttgttttttcatgtggttctttagcgcggtatccaaagctagccataactgaaacaccaaagtgttcagtatctaaaataccttcattcttaagaatttcttctactttttcaatattaaatccttcaattgggcatgaatcaatttgtaagaaagcagcagcagttagcatgtttgctagagcaatgtaagtttgtttacttgcccagtcaaaaattgcacgatcactttcaagtaaattgaaatcattcttctcaaagctttcgaaagctgattttctttgattggctacatcttcaggaagattttgaacttcagacataatcttagttatatattcagaattataaattgtatcaacttttttacgagcaagaagaattacaaagtgactagccccactaaagctattctgagctccccaagatacaggaaataatttttctttaagagatttattttgaactacaaggaacttccaaggttcaaaaccgaatgaacttggagaaaggcgcccagcttctaatatagtattaaaatcttcttcagatactgtttttgtagggtcaaattgcttgcaagcatgacgaaattgaaatgcatctataatttctttgtttttgttattcatttaaaaaccacctcttatctaagtataagctaagtctaacacaattggatactgcattgaagtacgcacaaatttgatatataatataaatgaacttacctaagtatctattttatactaaaggagctaaaagtatgcatgaacaagttatatatccagattgccccaatcatccatgcccagtagagacaacactaaatataattagtggtaagtggaagggcattattttatatcgtttattaggcggcaagaaacgatttaatgaattaaagaaattgattccaaatgttacacatagaacattaacacttcaattgcgtgaacttgaaagagataaaatattaaaacgtacagtttatgcggaagttcctccaagagttgaatatgagttgacggttcttggccagtctatgtcaccgataattaaatctatgtatgattgggggctgaattatcaatcagaattaaagtcttagaaaagaaataaaatatttaattagcgttttaatgagaataaaaatttaagactatattaaaataataaaataaaaaaagcattgacaaaaaaatattaaaattctataattaattcgtacccgaacgaacgaggtggtaaaaatgaaaaacaaatgtatcgttggaagaatgagtataattgttgaagcgtccaacaaatttttgacaaaaaaaataagggatgagcgactacctatattgcaaaatcacgcagcactatttgatatattacctgaagatggttcgaagttgctttttaatgaaatagcaagcacatggaaaatatcaaaatcatctttatctgacatcataaataagtatgagagtcaggggttaataaacaagtgcatgtgtagcgaagataagagaagtgtatatataagtttgactcctgaagctgtagttataaagcaaaaacttcaagttatggaaagagaatttctagatataatattaaaagattttggtgaagatgaaaaaaaggtctttgaagataatatagataaagctcttaaaaatataataaaaatgctctaaaggcattttttttaaatagataattcgtacgcgtacgaagaatataagagaaggagtgtagattatgaaagaattaataatgaaatcactagataaaattagaccgatgctgcaaagagacggaggagacgttgaattagtggatgtgagcaacgatggagttgtaagtgtaaaaatgcaaggggcttgtggaaattgtccaggagcaatgatgacaataaaaatgattattgagcaaaaattaaaggaagaggttcctggagttacagaagtcataggagtgtaaaactaaagagtttaataagttaatgtaaataaaatgtttttaaagttggcatatgcttcgtacgcgaacgaagtatatgctgaaaagattcgtttcgggtactaaatgaaatataaaaaacatatagaaattataattaagatattaaggtagatactaaaatattagggaggggtaatatgtttaattcaataagaaaaagattaatctttaattttgttttaatagcagcaataataactttaatttgtataactttcttttcataccagatggtaaatggaatacaaaaccaaatgaaagcagatggaattattttagttaataatataaaagcaaatatagaaagtgtaggagttacaaatacagataaaatacagggaataatagatcaaacatataaatattcagatggagaattatgctacataggtgtaatatcaagtgataaaactcttgttgcaggaacatctaaggaatcaattggagagaagattgattcaacaggattagatgcagtatttaaaggtgatacaggagcatatatgtacgaatggaaggggactcctgcatataatgtaacagttcctgtcaaagacggagatgatataggatatgctctttcaatcggaatttctgttgataacatgcaaaagtctattagaagcactattataaaaagcataatttatgccatagtagtattgatattagcagctgttgtaggagtatatataggaaggcgaattgcaaaacctatagaaattattaaggatgttattgaaaaagcagggaatggagattttacagcagaatataaaattacaggtaaagacgaaataggaaaattagcagctgcaagtagtaaaactagaaagagcatgagggagcttgttagaaaaacaaaagtaatatcagaaagtttggctaaactatcaaaggatattgaaattggaggcagcactgtagcatcctctagtgaagaaatcgcaacttcagtaaccaatgtatctcaagaaggtataaaacaagcagaagcgttagaagaggctgttagcttattagaaagtttttcaatagatttagataatgtggataataaattaacattattagctgatggtggaaaagtaataaaagatgatacaaataagggagcagaaactataaataagctagcgaacactatcgatgatatgttaaattcattttcggtatcaagagcaaaggttgaaaatttagatagcactatatcgcagattaattccatagttgatgttataaatggagttgcaaaacaaactaatcttttagcattaaatgcatccattgaggcagcaagagcaggggaggctggaaaaggattttcagtagtggcagaagaaatacgaaagcttgcagaagaagtattaaattcatcaaaaagcataactcaattaataaatacagttatgaaagagactcatgatgtttctaatactacagaggctgtaactaaaatagtagaagaaagtaaaaatgatatcaataccgtaacaaactcatttgaaggagttattagcaaggttaataatattcctagtgatattaatatggttcatgtggtacttcaagaaactatgaaaggaagaaataagatcttaaatacagttgaaaatatagcttcaaaatcgcaagaaatatcagccctttcagaagaggttacagcagctacagaagagcaagcagctataacaaatgaattttctatgacagcaaaaaaactagttaatatttcatcggtattagaaaaagacatcctaaactttagaatatagttccttatattggtgaattataaaagttagagtgattaatatatgatgagtaaaagtattaaattactaagtaatgcgtgagtaacacttgattaaaatatcaagtgctttttattcctaaaaatttataatttttctaatgtagatatagactaacctagaatataagtttgaatatatgcaattaaaataatattttagttaggttaatgatttaaacataagcacatatggtataatatttaaggattgggaaaggaggaataagtaaatggatttaaaatcattacttaataaagaacaatatgaaggggcaactacaattgatgggcaggtacttattttagctggagctggttcaggtaaaacaagagttttgacacatagaatggcacacatgattgaagatttagatattgcaccttatagtatattagctattacttttacaaataaggcagcaaaggaaatgaaggatagagttaaggcacttattggtgaaagagcagaaaatatgtggatatccactttccattcaacttgtgttaggatactaagaagagagatagataagataggctacaaaagtagttttactatatacgatagctcagatcaaaagacattagttaaagagtgtatgaaaacacttaatattaatgataaagatataacagaacaagagataatgggaaagataggaaaagctaaagatagaatgcaaagtgttagaagctttatgttagaaaatgaagctaactttagggaaaagaaaattgcagatgtttatgaaatgtaccaaaagagattaaaagaaaacaacgcgttggattttgatgatttaattttcaaaacagttgagcttttcaaaaataatcctggagtattggagttttaccaaaataaattcaaatatataatggttgatgagtatcaggatactaatggcgctcaatatgagttggttaaattacttgcttcaaaatataagaacatatgtgttgttggagatgacgatcagtgtatttaccagtggagaggtgcggatattcaaaatatactagattttgaaaaagattatccgggagctaaagtaattaagctagaacaaaattatagatcaaaaggaaatatactaagtgcagctaatgtagtaattgttaataatgcaaatagaaaaagtaaagtattaaggacagaacaagagccaggaaataaaattaaaatatatagggcctatgctgatagtgatgaaggagactttgttagtaaacaaatcttagatataaagaataaagaagataaaaattataatgactttgctatactatacagaacaaatgctcagtcgagaatttttgaagaaagttttagaaggaagggagtcccttataaaatagtaggaggcacaagattctatgacagaaaagagataaaagatgtattagcatatttaaaagttattgttaatcctcaagatgatattagcattagaagaataataaatgtacctaagaggagcattggtgatgcaactgttgcaaaggttcaagaatttgcaagcagctttgagtttgatttatgggacgcattagctgaagtaaggagtattccaacattaacgtcaagaaatgtttcaacaattgaaccctttgttgcgctcatggaaaatttcatggaactcagtgagacagtccctgtttcagtacttattgaatcaatattaaaagatactggatatctaaaacaattacaggaatcaaatgaaattgaagacaagagtagaattgaaaatttaaaagagcttgtttcagatgcagctgattttgaaaagaacaatgaagacaaatcgttatctgcttatttagagagagtttctctagttcaggatacagataagattgaagaggaagatgatgcagtagtattaatgacaatccatagtgcaaaggggttggagttccccgttgtatttatggttggtatggaaaatggtatttttccagggaatgcgtcatttgaaaaagaatcagagatggaagagtcaagaagattatgttatgttggtataactagagcaaaacagacattgtttatgacttcggcagaggttaggagagtatttggtaaaacagtagcatatcctcaatctgattttattaatgaaataaagccagacttaaaagaatatgttggagttaaaaaggaaagtgctaaaagcagggagaagatcatgcaaagcaattcctacactaacccacacagtttaagaaatagtgttacaggtaatagagcatatactcttaataatggcgggattaataatgtaattgatagaagtactatgaatgaaatggctaaagaatatatatctgttagtgaagcaacccttggaagaaaagtaattcatgaaaagtttggaaaaggaacaattgtggctgtccaggattcaggtaacgataagaaattaacggttgcgttcgataaacaaggtgttaagtcattattattatcttttgcaaaacttaaaatgatttagtggagatttggaggctaatatggataagattgaaaggataaaagaacttgttgaaaagttaaatagatattcatatgaatattattctttagatagtccatctgtaagcgacaaggactatgatgaaaaatactacgaacttcaagagctagaaagagaaacggaatatgtacttccttattcgcctacattaagagttggggatgtagtgctagaaggatttaggaagtatacacataaagcaaggctttggagcttagataaagcgcaaagcttgcaagaaattatagattggcataatagaaatgttaagtttgtagaagaggctaggggcagaggcgaaaatctgcctgatctaaagtatgttgttacaaagaaatttgatggattaacaattaacttaacatataatactgaaggtatacttgaaatagctgcaacaagaggaacaggaagtattggtgaagaagttacagcacaggtcaaaacaataaaatcaattccacttaaaattaatagcaatgatattttagaagttcatggagaagctattatgacgcaagaagcgtttaataaatataatgagacttctgatacaccactaaagaacttaagaaatggggctgcaggcgctttaagaaacttaaatgtaaaagaaactgcacgaaggaatctttcagctttcttttatgatgtaggctataaagaaggaactccatttaagacttatatggaaatgatggagtttataaaacagcaagggctccctgttgatgattatataagggtatgtacgtctatagaagaaattgagaaagagatagattatgtaagagatattagatttgatttaaattatgatatagatggattagtaattgcaatagatgatattagaacaagagaattgataggatatacagtaaagttccctaaatgggcgattgcatttaaatttgaagcccaagaagcaacaactaaacttttagatgttgaatggaatgttggaagaagtggtagagttggtccaacagcaatattagagccagtggaacttgcaggcgttactgttaaaagagcgactttaaataatatggatgatattgcaagaaaaggtgttagaattggtgcagaagtatttgtaagaagaagtaacgatgttataccagagataatggggatagtaccagaatctttagaaggttcagaggaaatatcagttccagaagtttgtcctgcttgtggcagtcatttagtgttaaatggagctcattatttttgtgaaaatactttatcttgtaagcctcaattagttaaaactatagttcattatgcttcaagagaagcaatgaatatagctggtttttcagaaagaacagcggaacaactatttgaaaaacttaatattaaatctatttctgatttgtataaactgaaagaagaggatttaataggattagaaaagtttgcagctaagaaagcgcaaaatcttctggaagctatcgaaaaaagtaaagattgtgagttatacgcatttatatatgccttaggaattccaaatgtaggagtaaagactgcaaaagatttagttagcagatttgaatctatagaaggcttgaaaaatgcaacctttgaagaactcgttggagttcaggatgtcggagatatagttgctcaaggggttttggcattctttaaagaggaaaaggttttacaaacaattgaagaattattatctctaggtgtcagtcctaaatatgaagaaaaagaagtgatagcaagtgcttttgaaggaaagactgttgttgcaactggttcacttaaaaattattctagaactgagataaaagataaacttgaaagcttaggagcaaaggttgcaggaagtgttagtaaaaaaacggattatgtaatagcaggagaagctgcaggatcaaaattaactaaagcagaggaactaggaatcaagatcctttcggaagatgagtttgaagaaatgctaaggaggtagagtatgaaaaaattaataaatttgcttgaatttatatcagcttttataacaagcatcttaataatttgtacttttttgacaacatatcaattttattatgttggtcagatttttaattcatacttaccgatacaacttggagtctgtatcactatggcaattttagcaattaggtttcttattaacgagacaggaaaaaagagaatagtatattgtatcttaagttttttaatatcaatatctttaattttctttatgataaatttaattaagtaataaaatattgattaaaacgaacttagcagctgttgatttgcagcagaagtttttgattaaggaactgactcaaagttatttaaaaacatttgagtcagttttttgattagacaaagtaaattgtggaaataattcttaatataaattaaggcaaagggtgtaattatgaaaagaatttttttctatgcaattatgttaagttttataatattattttgtttaggatttgtgaacaaagaaagtaacaatttatctactgatgattcgcaagaaacaataagttatggtataaatgagattccagaagacttagaaaaggttactaatttatctaaacgccatgaggatattatatgtgcagtaagcaaagggctggtttctaaagatgtggataataaaatagtaccatctttagcaggtgaaattacaaaaagcaaggatggcattcaatatgagtttaaaattagagatgatattttttggagtgacggaagtaaaataactcccaatgatatagctactttctttaaagaattactgaaagaagaagatgaagaaaatatacaagcattgcttaatgtttatggagctaaagaatttagagatgggaaagttgtatatgaaactggagttgcaataaaagtaaatgagaattctgttattattagattgaataaagcggatgataatttcttaaatgaattggccaaaccacagtatacactaagaaaatatttaataatgtggcgtaatatgaaaaataattatagtaaattaatttactctggtgattataagattgattcatttaacaaagatcaggttgtcttaaaaagaaatgagaataataataaaagtggtatagatactattaaaatattaaatgatgatagtgtagaaacatctatggcatcatatgaagttaaagaaagggatattgtaataaatccaccagaaagtgaacttaataaattatcagagcagaaaaaattaataacacttcccgaaacaaaaggaacatatttagtcattaacagtaaaagtaactctattcctcttcaaggaagaagagatatttataatgatgtatgtaaagctacagaatcgtatcaaaattcaaataataaagaatttgaacttgcagagggaagtttttttagggaggataaacaggatctaacaaaattgcaagcaaggaaagttattagcaataaagaaggtgaatggaacaaacctaagatattaacattactatgtgaagatactgatgagaatagaattttatgtagaacaatcgaagactggtttaaaaataatacaaatataacaataaaatatagtttagtaaaagaagaattcgaagatgaagaattgaaaaaaagatacgatatgattttggttaataataatgccaattcatctgagaaaacagatttttataataactttaaaaaatatctaactgaagaccagaataaattgttggaaaagttattaatcactaagaataatggagattattcaagcttagaagaaaatctatttgataactacgatattcttccgttggtgttttataatgaaaatatagcaatttctgataagatatctgatctaaaattagatggaaatggtaatataaattttgctacaatacaatagcaatagtcttaaggttaagattaatgattgtctatagcatatgttttcaatacaacgtattataactatccttatatgtaaatcttatattttgatttacatataaggatagttttttgtcatatccatatctatgaatcttaaaactttttcttactgtgtggatgttgtgctttatttttctttagttttttatttctaacagaatgattaattttagtcgtactatcattgtttaatgaagatatattagtattttttttgaaagtattaaagctattgagtacaggttgtttaaagtcaacaggatcttctgattttgataagtttaattgtgtctttatgttacttacattactctctggactagatgtagctaatggattattagagttactttcttttgcgtcagttgttgcaaaaccagtatttgagtcaatagagctatctaaatcagagagtctttctaatcctaatggtgggataaattccataaaatcttcaaccatatctttaagaaggtagataatcataaagaagttgaacatatttttgctactatcaaaagaagttcttttagtagctaatgaatcttttttctttgaataacttaagcttttaacaaatacaggagctaaacctgtgcttttaggagtaggtaatactggcattctaaaatatatctcatctaacatatcatcagaacgtaggcttaatttcttatatcgttctacttcgtctaaggttggtgcttcaggccaacttgttaaaagaccgccgtttacgaagaattttctataaagaccagaaataataggtcgtagttctgaaatcctatcttcttgaaatgaatacataagtaaacataaaaggtatagattaatttcaatgcaagagtatttactatctttcttatcagacaattttataaatatatttttatctgtatcatataaaccaatcagtttttcagtaatttctttagaaaattctttaaaagaaattatttctgtatgtttataagcttccattagacagatagaaaataatgcacaatcatctatagaatccatatagtaatctttttcttgaaatttagaaatcaaaaagtcacccaagtctaaaattaattctttcgcattttgtgaacacgaatatttataatgaatatttagagcgagaaaaatttgtatacattcactaaacgataaatcatataatacagaattataagttttaaacatatctagaatttcgtttgaaaatgcagcataatctttgctaagttcatcactatcattataatgtgagtatagtaagtaagcagccatcataaaagcttgatctgaaaatttaaatttatcatctttatctattaaagaaaatcccttggaatttccatcagatatattttttttatctacaaataagccttcattatttcgtaagttttcagaatagaattgtaactgctctctagcaaggaatttaaatggtttctcaagagatactatatttcttttcccatcactataatgtgaataatattcgcttaattcaagtaaacataaagtcataagagcactagtagaagggcttatttcttttttaaaacttgcctcatcaaaactagggctgcttttactatgaataaataacggtgaagcttttctgtataagcataatagtggagaaaaattatttaatatgctaatatcttctataggagatttttttgaagctctagtttgagctaaaattccgcatttagagtttagaaccaaagtctttattgattctttggataagtaaaaaagttgaccactaatttctttttgggaaagactgttcatcctaaaaaatggtcctatatatctcaatgtataacacctctcataaaattctcatcttattcattaatatgaaatttgtaaacaaaaagtacataaaataaaaataaaaggagattttttataatgaaggaaggaaaattagatttcgaggatttgagaaatatcatattaaataataaaacaattaagagaaaggaggtaaagattagaaatgatgttggagaagattgctctattattgattttggagaatatgaaggaatattttctacagatccgataacaggagcaagtgagaatgttgggaaactagcagtacatattaattgtaatgatatagcatcagcaggtggagagcctataggtattttagttacaatattagcgccaacatcatcaacattacgagagataaacgaaatcatgaaggaaattaatgaagaagcagctaagattaatgtagagattataggaggacatacagaagtaacaagcgcagtaaataagatggttatatccgtaacagtgataggaaagaatttaaaaggtaaatctgtaaaaactgcaggagcgcaattaggagatgacataatagtaactaaaacattaggattagagggtacatatatcttaataaatgaccataaagcaagaattgagaaaattttatcaaaagaggagatagaatttggaagtaatttaatcaataagctaagtgttcttagagaaggaaaaataggcggagaatttggcgttaattcaatgcatgatataacagaaggaggactacttggaggactttttgaggttgctatggcatcaaataaaggctttaaaatatttaaagagaaaataccaatgttggatataactaaaaaggtttgcgaagaattcaaaatagatccacttaggctcatatcgtctgggagtatgcttattactactaaaaatggtactgggttgataaaacttctaaatgaaagtggaattgaggctagtataataggaaagatatgtgagagtggagcattattaatagatgatgatattgaaatagaggttgaagcacctaaaagagatgaattatttaatatacagtaagaatgctaaaagattaatgtgtttcaagtaaattagttggaattatataaaggttatttaggaatatatagtgttaattaggttacttaaaaatgaaaaagtgataatattattagtgatagaaaagcaaaagaaccagtggttttaaagcactttatagagtaattatgaaatttgaaatttttattgtaaatgagcaaaaggagatatataatgaaaaaattaatattagctagtaataataagaaaaagattaaagaaatgaaagaaatattaaaagagatagatatagaagttagatcattggaagatgagcgtatagacatagatgtagttgaagatggaaaaacatttgaagagaatgcaaaaaagaaagcaaaggaaatatatgaatatctgttggaaagaaaagatagtaattttattgtattagcagatgattcgggattagaagtaaattacttaaatggggagcctggaatttattctgctagatatgcaggggaacatggaaatgattcaaaaaataatgaaaagcttttaaacaagttaaaaggagttttaaaaagcaatagaggagctaagtttatctgtcaattagctatgtttacagataagggtgagtattttaaagttacaggtgaagtagaaggatatattatagaagaactacatggagatgggggatttggatatgatccattatttttctacgagccattagataaaacttttgcagagttaacttcagaggagaaaaatgaaataagtcacagaggaaaggcattaaaggaattaaaaaaggtaattaataaattaatttattagaaagttattccaggtaaataggctctttactatataagagttaaataaataataatgcaggaggagaaattaaattatgttaattgcagttgtaagtgatacacataggataactaaatatattaatttggctaagaggctaataaaggatgctgatattttgatacatctaggagataacattgatgatgcagaattattggaaaatacttttaaaggaaaagtatatgctgttgcaggtaattgcgattattcaactaagtatccaaaggaatctgttatagaagtgaatggaaaaaagatattttttacacatggtgacctatatggggtaaagagttctatgaataatatctattataggggaagagaattaaatgctgacattgtgttattcggtcatacacatcagcaattagtagagaaagaagatgatatgatattaatgaatccaggaagtatatcattacctaaatttaaagggagatgtataggttttataaacatcgataataatggggaagtagatgcatatttaaaagaaattagggaataatgattaaatatttaaatttattatgaaaaattataaaaaaggtattgacgaaacagatttgatattgtagaataatcattgtcgctgagagatgagtgacaagttgaaaaactagttaagattctcggggtgtggcgcagatgggagcgcgcgtggtttgggaccatgaggtcgcaggttcaatccctgtcaccccgaccatttaaaggttaatatttgcgggtatcgtatatcggtaatactccagccttccaagctggaaaggtgggttcgattcccactacccgctccattaaaaattatgatattaatcaaagtggtaaaaaaagccttgacaaagtttgaaggaacatgtaaaataaaaaacgttccgaagaaaaagttcttgacaaaattgcttgaatagagtaaaataaaaaaagtctgaaaagcaattaaatatgcgtttttagctcagctggatagagcaacgcccttctaaggcgtgggccaggggttcgaatcccttaaaacgcaccattaaatcggggtgtggcgcagatgggagcgcgcgtggtttgggaccatgaggtcgcaggttcaatccctgtcaccccgaccatttaaaaaataaatatgcgggtatcgtatatcggtaatactccagccttccaagctggaaaggtgggttcgattcccactacccgctccatacaaatttaatatttgtaacataataaaagatatgcgtttttagctcagctggatagagcaacgcccttctaaggcgtgggccaggggttcgaatcccttaaaacgcaccattatggtgaacgtagttcagttggtagagcgccagtttgtggcactggttgtcgtgggttcgagtcccatcgttcaccccatacagggatatcgccaagcggtaaggcaatggactttgactccattattcgtaggttcaaatcctgctatccctgccattattttggttcactagctcagtcggtagagcacatgacttttaatcatggtgtcccgggttcgattcccgggtgagccaccaaattcataaaaacttatgcaggtgtggcggaattggcagacgcactagacttaggatctagcgcctaacggtgtaagagttcgactctcttcatctgcaccaaatgagcggaaatgactcaacggtagagtgccaccttgccaaggtggaggctgcgggttcgaatcccgttttccgctccatttatataaaaataaataaatatgcgggtatcgtatatcggtaatactccagccttccaagctggaaaggtgggttcgattcccactacccgctccaattatgcgtgattagctcagttggtagagcacctgactcttaatcagggtgtccagggttcgaatccctgatgacgcaccaatagtaaatttattgtttacttaaaagtttgggataacgtgtagttcattccattacagggatatcgccaagcggtaaggcaatggactttgactccattattcgtaggttcaaatcctgctatccctgccaatattttggttcactagctcagtcggtagagcacatgacttttaatcatggtgtcccgggttcgattcccgggtgagccaccaaattcataaaaaagctcatgcaggtgtggcggaattggcagacgcactagacttaggatctagcgcctaacggtgtaagagttcgactctcttcatctgcaccaaatgagcggaaatgactcaacggtagagtgccaccttgccaaggtggaggctgcgggttcgaatcccgttttccgctccatttatataaaaataaataaatatgcgggtatcgtatatcggtaatactccagccttccaagctggaaaggtgggttcgattcccactacccgctccaaaaaacaactgatttcagttgtttttatttatataaaaattaatatgcacttgtagttcagttggatagagcgttggacttcgaatccagaagtcgtgggttcgaatcccaccaagtgtaccaaacatgaggaataccagcggcctaaagaaatttagagcgttggtgttttttgttgcggccaaacaaaatagatttaccaatgattacggaggctaacgataaatattatagtgtctccaagattattagacaattgcacaatatcagaaagtaacaatacagcatataataaagccttagtttgtcatagagaatgtatgttattaggaattaacaaggatatgcaaatggaatgggggtatactcaagatggattccaaagaattaagagcttatataagatgtgatttaagaatagtaaattaaaaaggcataagtttagttaatgcaaaagcttaatattatttattggtgtatggggttatccgtgcaccttttttatttatctgccgtggccattgctatgagtataagtcatgtagctttcataagacagatcaatataaaagacaattaaaagcatatagggaagggatcaatcaataattaaagagaattagtatcatatttattacaatatattgtataattaacataaaatagtaattaatgttgagttaagacaggagaggaggcgtagtacttttatgagaaaatatattattcatgcatagcaaaggctatagcataaaacaaaaagcatgaattagcctttgcttaatcctaagataaaattatattaggaggagcaaaatgagctatataaaagcaaccgagatattaccaaaggaattattgaatttaattcaaaactatattgatggagaatatttgtatatcccgcgacgagaatgcaataaaaagagttggggagaaagcacaaagagtagaactgaaattgcaattagaaatacaaacatattcaaagattataaatctggtatttgtataaaagttcttactagtaaatattatctatcagaaaaaagtatacaaagaatcatttctcaaataaaaaagaaagaataagaattgtgtgtgccgtaatgtaattataagttatggcgcattgttttttcagaattatttctgaggttgttagttattacattaaaataatataatttaaatgtagtatttactaacttacaggaattcatttgggagatgattaaatggaattagaagaaatgagcagtttttttaatagcagatctgagaactatgagcagcatatgatgaataatgttgagggtacaaatgaactttatagtgaaattgcaaaattaataccaaaaataaatgaactaaatttgcttgatttaggatgtgggacaggcttagaattagatgaaatttttaaagttaattcaacagtcaaagttacaggaatcgatttagctaagaatatgatggaaaaaataaaacagaaacataatgataaattaaaccagcttaatctcattgttggtaactactttgagtatgacatcggaacatgtgtgtttgagtgtgctttatctgtagaaacgcttcatcatttcgcgcatgaagaaaagattaaattgtataagaagatttttagaagcttgaagcagaatggtttttatattgaagcagattatatggcaccgaatcaagaatatgaggattattactttaatgaaaatagaagaattcgttcaaaattaggtataactactggtttctatcactatgatactccgtgtactgtagaaaatcagatgcaaatgttgaatatggctgggtttaaatctgtagaaaaagtctggaaatatactaatactgttattttgttagcaaaaaaataatttagttatgattgaaatattaatcaaaagatgatttgtgatagttttttattcccccctattttggggaattttttattgaacaaattaacaccatacagtccccatttagatacataatttcccctaaatgaaattttgaaaagatttgtttcttaaaatatgttatagtttaatatatatggtaaattactgtttgctactaattattgaaagaggtgttctgcgttggaaagaagattaagtcttttgtttggcataataggaggttggtgtcttgtatcattaaattcaaatgaattcaaatgaattcaatgccatttggggaacagtttttagcaccacttttatttataattcctatacttctaagagtattaagtatttatgcacttattttattaattaaagcactaaaaatatatatcgataaaaattcttaaattattgatttgaaacaaatgtagagttttctagattattaaaatttttggaaaagtaatttaagaaatacgcaaactgagtaatgaatgtgtatggaaataatatacgattaactgatagagtaggtggtaaaatgactaaaagaggagtattaatatttataattttaagtatgattacatttgttttttatgcttataacattaacggagagtccaggggatttattaatgatatgattaataagatagaaggaaaaacattaaattcaaaatttcaaacaaaaattaaatctggaaatttatcaactgactataatatagatcaagtgcttaaagatatagataaattgcagttaaatactttaaatgttccagtagttataaatatagatagtagaacttctagtaatatgacaatagataaaggaagtgaaaagagggctatcgaattatttgaaaaattaagatggaaaaaaataaatataatattagaaccgtatccatggattgaaaacggaagtataggagaaacagaatggaaaccagataatatagatgaattttttaataactggactgataatgttttgggaaatttaattaaagatgtagccataccataccatgttgacgcattaaacatagggactagttttgtgtatatggaatctaatgagcagaaaatgtgtgatatggttgattatgttagaaatcgctacaaaggtttattaacttatagaacaaatttttgggttacagcgaaagatttctcaccagaatttacagataagtataatgaaaaattaaataataaaatattttcaaaggtagatttcatttctatagcatcttattttgaacttacttctaatgacactaatactgtagaaaatctaataagttcattagagtgtacccaaatatatgatagaaaacaaaatataaagcaggaagtaaaaaacttctatgataaatggaataagccaattttctttggagaattaggtttcccaagaactaataaggcttctgttcaaccacataatccgttgatttctgatattgtaaataataaggaacaggcaaattgctttgaagcatatagaagtgtctttgaaaatgaatcttggaatcttggattctctatatttgcaataggtgaaactagtgatgataaaaagtattatccaagtgatgaaagtgttgaaatcataagaaaatggtatgcaagaaatgaaagctaataaaaggatatatttataggaagtttaataaaaatgtatataggctctaacttataaagtttacagtatatagagttattgtgaagaatatgatattcatgaggtgttttatgattagtatttttttagagcctatatgtaactttttaaaagaagttataaagcttttagagctttcttatagcaacgaatacatttacatatttatgtataagtagtaaaataaagaatagtgagatgattaaacaaatctaaagataattttattaagaaacgtttataaggaggtacacattgtgagtacaggaggaattagaaggctttcaaaatctatcaaatttgagttgttgatagaatggagctttttttttatttttatggcatttctgattattatgaataactatagtaatttattttttcatactggaatcgagttgtttattaattttatttttgcagtagtatttgtatttgcttttaatacttatagaattaataagaacaacttcctattaatattgggaattggatacttttttgtagcagtactaggaatatttcatatgcttacttatactggaatgcctttcttaagcagtatggatggattaaagatagcaacccaattttggattgcttcaagatacatgggtgcctttacatgtttgattgcaataatatttaaaataagcccacaaaggaatatgaatccgtacgcactattcatcacttatttttgcataacaatatttttgatatcgtcaatatgtatatttaaagtttttccagattgttatgtggaaaatgtggggttgacctcctttaaaatagttagtgaatatgtattgtgtactgcatttttaataattgctactgtattttttatattcggaaaaaatattgataagtatttatttgtatgttttgaatgttttcttatattatctggagtatgcgaaatgttttttgtaagttatgtagttccgtcagaatttaccactataataggacatactataatgattttagctgcatattttttatacaaaggagttgtagagacaggacttagaaagccatataatcttatgaatagcgatttatatacggctgataataaagtgaaattatttgaagaaatagtatttaataatgaagaatgtcttaatatgataataaacaactctgacaatgcaatttttgttattagtaataataagtttatatttgcgaacgagaagatggctgaactcttgggagcggaaaaggttgaagaaatcataggaatagatattgagaaaataattacagatgaagctaaaggtgcagtttatagaagaatagataatgctatatgtaataaattaagtacaccatttgttgaaagcaagctattgagacttgatgggaaaattgtggacattgaagttacaaatagcttttgtatgtataaaggacaaccttctgctatggtcatgctcagggatattacctcaagaaaacaaatacaacttttagaaagtaacatcgaggaaaacaaaaaattgataagtaaggctacagaacttaataagatgatgacagaattcttttctaatatatcccatgaacttaaaacaccattgaatgtacttctgggggctgttcagatcttatcattgtcaggcaatgataaaaataagttagaatcaggtaaatacttaaaaacaatgaaacaaaattgctataggcttgtaagacttgtaaataatcttattgacatatcaaagtttgattctggatactttaaaatgaatctccaaaactataatgttgtaagtgtcattgaagatataacattatcagttgcagattatgcaaataataaggggattgacttaatatttgatacagatgtggaagaaaaggatatggcaatcgatttggataaaattgaaaggataatgttaaacttattatccaatgctattaaatttactgataaaggaggacagatattggttaatatgtatgataaaaaagataatattgtaatatctgttaaagataatggcgttggaatgccgaaggataaactaaatatgatttttgaaagatttggacaaatagacaaaacacttgcgcgcaatagccagggcagtggtatagggctatcccttgtaaaatctattgtagatatgcataatggagatattaaggcttttagtgaatttggaaaaggaagcgaatttgtagtcaagttgcctgttagatttgttgaagataaactatcatcagatggacgtttatatgaaagtaaagtagaaaagataagtattgagttttcagatatatattattaaatttgtaaatttgcgtaatgatctgtgcagagcacgacatgtaagtgatgatagatatgagtaatatttatttagtattataaagtaaatgaggggtaaataatggagatttttatttataggacttataatgagtggtttgatgacaaacctactgagacattggagggcgaggtgaattctatatacaatggagttttagttattgatacattggaagaattcaagaggtataggcaaatactttcattaaaaaataactttgcgattgtttataagctttcatatggttttttatcatatgctaaagaaatcaatatttattcaaattttaattcttggcaaaactctaatccggaaattaccattatgggggaagtatgtgaaagtgaatccgcagatagtcacttagtctttataactcaagagggctttaagcagtgtatatctttatgtgaaatttatgcagtaacatatgaaaggtaggattatatgtatctacaagatatagatttaagaaaggtgtatacaatatggaagtcaaatttagggccatttcaagggttcttcagaagtacaccatttgtttcacttcaaacatatgataattttatattaaaagaagaaaatgcatgtcaatgtaataaatatatattggatataatagtagaaaactgtagtaagaataatttttttatagttgatttacctattgatgagattttaaatttagcgtttttattaaataatgaatattttataaaaccgattctaaatattaatttattattccatccatttggaataatagggacaaaagagaatattaataaattgataaataatggtttgaatttaaagaaaataagtactgaaaagtttattatgctgataccgtatgataggtataatgataattggaagagtgatgacttgaaagataaattgaataatcaatatggaatgagtgatgatgatcttccaagtgcggatatactaaaaattcttggatacactaaaataactattttgactataaataagattaaagatgacttacaggattatataaattttataaatgaggatatagaagtagaagtgataaaggtgaggggataatgaaagatttcaagcagatagtaaagaaaaataagaggaaagcattatccattgcggtagctgctgcattttttgtaagtggaccgcttggatttacaggctgttacaaccctcaaaaagaagatgacgaagaccaagatggaaatggttctaattatagtggcggtgggcacgttggagggtggaatagttttagcagtggttcatctataaatagtgactcttctagcaagagcaaagctagcatatcagattcgtcagttggtaaatcatcaggatactctggatcaaagggcggaagttcatcaagttagcataagcgataagataattaaaattttaagtatctttatgtatgtaaagaaattatttaggatgtggattactctatggaaaaacagattaattatactgaagatgttttatttaataactatatggtgagttctttaggtgaagagtatgttcactcgcaaataccgttttattttgataaatcaacttatgaaaaaatggtgttttatagtgaagaaataaatagaatttcattaaatgtacttaagaacattaaggaagggcatagtgagttattgaattattttgatgatttcatgtttaaagaaaaaatatttaacttgaaatgcccaatgtctccgatgttttgggccagatatgatacttttagagacgttgatggggatatttattttgcagaatttaattatgataaaccttgtggtcaaaaagaaattgatttagcaggtaaatgtagttttgatggaaatataaatgttagttttataaataatgtagttaaagaattattaaaaatatgtaaagaatatgagatggagaaagaaaaaatagatgtgggatttttgatggatccgtgtcattatgaagaattacatcacagttattactttaaacatattttgaaagatactaatattaacatagtacaagttggacccaataatttatctgtaagagatggatatgtttatgcatattctaattttaagcttaaaataattttaagattgtttcctacagaatttttttatgaaatttctaatataagtgaaatattgaattgtgttgattgtgggaatctattgttaattaacgatcctagagtaattgctattcaggcaaaaggcttcttcgcttatttatggaatctggttaaatctgattcaaagcttctttcaattagggataaagaaataattacaaaatgtattccgtacacagaaatactaaatcaggatgatatacaagatgtaataatcaataaggacagctatgttgttaaatcgtccttgggtcgatatagtcaagaggtttacataggtaagctttatacacaagaaatgtgggaaaataaaattaaaactgtatctaaaagcaataaagtacatgtaaagcagaagttgataaatattagacaagaatatacttatgcgcctgggaataataatatgaatattccagttttggcctttggaaactttggtatttatataatggattataaagtagagggacttttggttagatggagtagagaacttctaactaatgatgattacacgtggatgtgcccaataggagttgaaaatttcccggtttatataaaggaatttaatcctaaaaatagaaaagaaatttggaatgaaataatagatgaaagtgtatttaaatataatttcacaggagtttacacaaatatttatgaatacatatcattgaactcactaattttaaaagaatgtgcctataaagaaatgctttcagtaagtagtaagttttgtgagattttaaaaaaaatatatccatatatacaaaaagaaatagaacttttcgggcctatactaggtataccagaagaactttataaattagtttcaacttcatgtgctacatcactttgtgcattaggaagaattgattttgctattgataatgatggaagtttgaaaattttagaatttaattctgagacacctgcaggtttagttgaagcaattggattaaattctataattaaagaaaaacttaatatccaatatcaaaaccctaatgtaaatctcaaggagaatataaaaaaatcattttttaatatattagaagaacttaagaaaataaaaaaagttaaaaatattgctgttgtaacttcttggtattatgaggatatatatacaagcaatttaatagctgaaatattaaaggaattgaatgagtatagtgtagtttttggaaatatatatgatttgaaagtaaataacaataaaatttatctctatgggaatgaaattgatgccatttataggcattatccattggactggttttcttatgaagatgaaatgaaaaaactaattgatcctttaagttcgggacagtacttaataaatcctggacatacacttataactcaatcaaaggctctattcgcagttatttatgagcttgttaggaaaaaattcttttcacgtgatgatgaggagtttgttttgaaatacataccatatacatgtttagagcctgataatgttctttcttttgattatgtaaccaagccatatctttcaagggaaggagcaggtgttatgttaagttatgatgaaatgagtaaagaattagatgatatagcgtttcaagatagagtaaatattaaaccattatattcaaatatttattcaacaatgaaagaagaaagcaaatacttgtttcctgtaataggtacatatataacaggtgatataccatcaggagtatttactagaatgggagattttataactgataaaaatgcagtatatgttgctacatacattgagtagtaacataagctttaaatttgattagtgtaatattaaaaatatacaattatagaagaatatgagttaaggctaattatttaaatagtaataaggaggaaagatttatgactggtattgtaaacaatattgtagttagtattatttttggattgataggtattatattgctgatattcggatactgcttctttgataaagtattaactaaaattgattttaatcaagaattaaaagagaagaatgttgcggttgcaatagttatagctggttttatgatttctataggaattataatttcaggagtcgtatcttaaaaataatatatttacgaagagtaataattcaaaaaccatcttgaaataaattgatatttcaagatggttttttttgtttattttaaaaacatgaattatttatagcaataaattaaataatagtattaggctaactttaggtgaaacgattggaatcgttattaaatagataattacaattaaaatactaaggaggagagagacgtatgagaaaaattacacttaagaaaattacatcaataatattagtattatttttaagtatatcaacttcattaaataatactccatatagctcagaatttaatataataagtgttctaaacagtaatagtatagaatcatatagtgatgctaggatagaggatgatttttataatgcagtaaataaggaatggttatcaaaggtaaagcttgatgatggatacatttcctatggaacatttgaggaagtatgtgggagagttaatggggatattcttaatataatatcagatatacaaaaaaataaagacaattatgataagaatagcgatgagttaaaagttttaaacttatataacaactatctagatatgaaaaaaagagatgaattagggacaaaacccttagagaaatatatgaatcaaataaatgaaattaaggatacgaatgatcttaaagccatattgaaggatgatgaattctcatattttcaacctctaataaacttaggcgtcggtccagactataagaatagtaacattaatgttttatatgtttctagaagtaatcttggattaggaaattcgttttactataaggatactagcgagaagagtcaaaaaataaaacagatatatataaattatatagctaaattacatatgctatatggagaaaatgaagatgtagcaaggaaaaatgcggaaactttttttaatattgagaatgaatttgctaaaaagataccttcttatgaggaggaagctaaagatgaaaaccgaatacagaattcttataatttatatacagtaaaagaattaaataagttaatacctaatgcagatatacctggattattaaataaattaaatattaataatccaaagaaaataatagtggaaaacccagaagaattaaagttagtaaattcaattattagcgaagataatttggaaaatataaaaacatattttaaaaccaatgtattaatgaacacagataattatttaacatctaaacatagagaggcgtgtaatgaattaagaaaagtgctttatggagtagaatgttcggaattagatgaaggctcaggggtgaaatttgttagtggacaattgaatgagattataagtaaattgtacgtaaataaacattttgatgatgaatcgaagaacgatgtagaaaaaatgtcaaaagagataattgaaaactttgaagatagactacaaagcaatacttggatgagtaaatcaactaaagagaaggcgctcagaaaattggaaaatgtcaatgttaaagtgggttatcctgaaaagtggaatgactatagtgatgtagtaataaattcctatggtgagggaggatcattagttgataacctaataagtatatatacatctcaaagtaaaaaacagttttccaagttaaatcatgaggttgataaagatgaatggaacatggggccttgtactgtaaatgcctactacaatgctttaaataatgaaattgtatttccagcaggaatattgcaagcaccattttacgataaaaatgcaaaaaaagaaaaaaaccttgggggaattggagttgttattggacacgaacttactcatgcgttcgataatacaggtgctcaatttgatgaaactggtaaattaaaaaattggtggaatcaaaatgactataaggaatttacaaacaggagtaaaaaggtggtggattattattctaatataaatatggggaatgaaaagaatgtaaatggaatattaaccgtaggagaaaatataagtgatttaggtggtatggcttgtgttttagatattgcaaaaaaaatggaagatcctaatctaaaggatttatttgaaaactacgcgacagtatggagagaaatatcaacgaatgaattaaaagagtatttattaaataacgatccacatgcacctaaaaaggtaagggtaaatgcagttttatctcaatttgaggatttttataaaacttacaatataaaagaaggagataaaatgtatgtaagaccagaagatagagttggaatatggtaaaagaaaaataaaaactgaatattgaaatcatgacatagcggcactaattaatgtgaataaataaaaagtatagttaaacatatccatgcgtgtcgctgtgttgataaatgagtaataaaaagaaaaagagagaaaataaagaatatttatcttaaaatagtgcaaaataaaacatgagtaataaatatgatgatataatagattttgttgtcacgagagttgatgaaaaatgctagaaattaaaaaaaagtgttgacattgattttggatgatgataaactaaatgagttgcttgaaggcaacaagatctttgaaaattgaacagaataacataaatacatttaagtaaaccagcaatttttatttgagtaagctaagattaaactttttattgagagtttgatcctggctcaggacgaacgctggcggcgtgcttaacacatgcaagtcgagcgatgaagctccttcgggagtggattagcggcggacgggtgagtaacacgtgggtaacctgcctcatagaggggaatagcctttcgaaaggaagattaataccgcataagattgtagtgccgcatggcatagcaattaaaggagtaatccgctatgagatggacccgcgtcgcattagctagttggtgaggtaacggctcaccaaggcgacgatgcgtagccgacctgagagggtgatcggccacattgggactgagacacggcccagactcctacgggaggcagcagtggggaatattgcacaatgggggaaaccctgatgcagcaacgccgcgtgagtgatgacggtcttcggattgtaaagctctgtcttcagggacgataatgacggtacctgaggaggaagccacggctaactacgtgccagcagccgcggtaatacgtaggtggcaagcgttgtccggatttactgggcgtaaagggagcgtaggtggatatttaagtgggatgtgaaatactcgggcttaacctgggtgctgcattccaaactggatatctagagtgcaggagaggaaagtagaattcctagtgtagcggtgaaatgcgtagagattaggaagaataccagtggcgaaggcgactttctggactgtaactgacactgaggctcgaaagcgtggggagcaaacaggattagataccctggtagtccacgccgtaaacgatgaatactaggtgtaggggttgtcatgacctctgtgccgccgctaacgcattaagtattccgcctggggagtacggtcgcaagattaaaactcaaaggaattgacgggggcccgcacaagcagcggagcatgtggtttaattcgaagcaacgcgaagaaccttacctagacttgacatctcctgaattacccttaatcggggaagcccttcggggcaggaagacaggtggtgcatggttgtcgtcagctcgtgtcgtgagatgttgggttaagtcccgcaacgagcgcaacccttattgttagttgctaccatttagttgagcactctagcgagactgcccgggttaaccgggaggaaggtggggatgacgtcaaatcatcatgccccttatgtctagggctacacacgtgctacaatggctggtacagagagatgctaaaccgtgaggtggagccaaactttaaaaccagtctcagttcggattgtaggctgaaactcgcctacatgaagctggagttgctagtaatcgcgaatcagaatgtcgcggtgaatacgttcccgggccttgtacacaccgcccgtcacaccatgagagttggcaatacccaaagttcgtgagctaacgcgcaagcggggcagcgacctaaggtagggtcagcgattggggtgaagtcgtaacaaggtagccgtaggagaacctgcggctggatcacctcctttctatggagaaatctagatcagcatgatgtctgactagtacaaatacatcattgatgtatcaaaatataaaatacttgctcaaaggttacttaagtatttgttctgttcaattttgagggattttccttcagaataagggcttatagctcagctggttagagcgcacgcctgataagcgtgaggtcgatggttcgagtccatttaagcccaccaatgttctttgaaaattgcatataataaatgtatataaaatacaacaaagccaagaataaatattctttgtgatatgactaataattaggtcaagctacaaagggcgcatggtgaatgccttggcatcaggagccgatgaaggacgcgataagctgcgataagcttcgggtagacgcacatagtcagagatccgaagatttccgaatgaggaaactcacatgggaaaccccatgtatcataaagtgaatacatagctttatgaaggtatacccagggaactgaaacatctaagtacctggaggaagagaaagaaaaatcgattttcttagtagcggcgagcgaaaaggaaagagcccaaaccagagatttatctctggggttgcggacagaacataacgagaaatcatagttaattgaacacaactggaaagttggaccacagtgggtaatagtcccgtaagtgaaaactatgataatcagttctgcaccagagtaccacgagacacgtgaaaccttgtgggaagcagggaggaccacctcccaaggctaaatactacctgatgaccgatagtgaagcagtaccgtgagggaaaggtgaaaagaaccccgggaggggagtgaaatagaacctgaaaccatgtgcctacaaccgatcagagcaccttatgtgtgtgatgatgtgctttttgtagaacgagccaacgagttacggtatgtagcgaggttaagtacttaaggtacggagccgaagggaaaccgagtcttaatagggcgactagttgcatgctgtagacccgaaaccgggtgacctatccatggccaggttgaagcgagggtaaaacctcgtggaggaccgaaccacgttgctgttgaaaaagcatgggatgagctgtggatagcggagaaattccaatcgaactcggatatagctggttctcctcgaaatagctttagggctagcgtcggaaaatgtgagtagtggaggtagagcactgaataggctagggggcatagcgcttaccgaaccttatcaaactccgaatgccacatactatcagtccggcagtcagactatgaaagataagttccatggtcaaaagggaaacagcccagatcgtcagctaaggtcccaaagtgtaagttaagtggaaaaggatgtgggatttctaagacaactaggatgttggcttagaagcagccactcattaaaagagtgcgtaatagctcactagtcaagagatcctgcgccgaaaatgtccggggctcaaacttaccaccgaagctacgggttcacgtttaacgtgagcggtagaggagcgtcgtaatcgggctgaagtcgtaccgtaaggagcggtggactgattacgagtgagaatgttggcattagtagcgagatgtaggcgagaatcctacaggccgaatatctaaggtttcctgagtaaagtttgtcttctcagggttagtcgggacctaaggcgaggccgaaaggcgtagtcgatggacaattggttgatattccaataccactataatcgttattatcgatggtgtgacggagaaggataggatgtgctagctattggatgctagtctaagcgtttagggagttgggattggcaaatccgttccaacaattctgaggcgtgatggggaaggttctacggaaccgaagtatctgattccatgcttccaagaaaagcatctagagagagaagtagtgcccgtaccgcaaaccgacacaggtagatgaggagagaatcctaaggccgacggaagaattgcagttaaggaactaggcaaattgaccccgtaacttcgggagaaggggtgcctgagaaatcaggccgcagagaataggcacaagcaactgtttaacaaaaacacaggtctctgctaaagcgaaagctgatgtataggggctgacgcctgcccggtgctggaaggttaaggggaacacttagtggtaacgcgaaggtgtgaacttaagccccagtaaacggcggccgtaactataacggtcctaaggtagcgaaattccttgtcaggtaagttctgacccgcacgaatggcgtaatgacttgtgcactgtctcaactgcaaatccggcgaagttgtagtgcgagtgaagatgctcgctacccgcgattggacggaaagaccccgtagagctttactgtagcttagcattgaatttcggtattgtctgtacaggataggtgggagactgggaaactagggcgtcagccttggtggagtcgttgttgggataccaccctgatagtattgaagttctaactggatgccatgaaactggtgacaggacattgttaggtgggcagtttgactggggcggtcgcctcctaaaatgtaacggaggcgcccaaaggttccctcagaacggtcggaaatcgttcgaagagtgtaaaggcagaagggagcctgactgcgacacctacaagtggagcagggacgaaagtcgggcttagtgatccggtggtacctcgtgggagggccatcgctcaacggataaaagctacctcggggataacaggctgatctcccccaagagttcacatcgacggggaggtttggcacctcgatgtcggctcgtcgcatcctggggctgaagtaggtcccaagggttgggctgttcgcccattaaagcggcacgcgagctgggttcagaacgtcgtgagacagttcggtccctatccgtcgcgggcgtaggaaatttgagaggagctgtccttagtacgagaggaccgggatggactgacctatggtgtaccagttgtttcgccagaagcatagctgggtagctaagtcgggaagggataaacgctgaaagcatctaagtgtgaagcccacctcaagatgagatttcccatagcataagctagtaagaccccttgaagactacaaggttgataggtcagaggtgtaagtatggtaacatatttagctgactgatactaataggtcgagggcttgaccaatatagtcaagttgtaatatacattaaaattatatgcaattttgaaagaacattatattctttcaaatgacgttccgcgatagctcaatggtggagcactcggctgttaaccgataggttggaggttcgagtcctcttcgcggagccatatttataataaaagaatttttagtcgagaaatcggcttttttttattgtataaaatagagtaaaaacttatactatatatggatgtgaaagttattaataactaaattagatactacggaataattaataataaaatctattgaagtataagaggtattataatatgagcgatgacattaataatagtatgaattatagtaatggaaccagtaaggttactgaagcaaaagaagctggtgaggctgatgaatctattgaaaatagtgatatagatgataattctagaaccaataagggtaattccgagactaatgatattagtgataatataaggccatttgagatcgatgaagttggtgaagaagatttcaaaggtataaaaaaaagaaaatttgctattttacttacgatagtagctgtagctataattataggaatcgctattactgtacaaaaatctgttatgaataggcaaacagcagaagctcttaatgcaaatggaaatgcatattctgaaggagataaaaatcaaacagatagtaacgtatataattcagcgagaagttcagaagtagaggatgttgcttttatagaaaaatatttaaatcagcagatgaaggggcaaatgcctgatggagctgatggaaagaaagttgtttatttaacatttgatgatggtccgtcagaaactgtgactccaaaggttttagatactcttaaagcagaaaatgttcatgctactttttttcttgtgggaaaagcaatagatgaaagtgaagctaataaaaatatagttaaaagagaacttgcagaaggaaatgcaataggtaatcatacttattcacataattatggatatttatatccaaatggaaaaataaatttagaaaattgtatgtctgattttgaaaaaactaatcaatctttgaaaaacattttaggacaggatttttccacacgagctgttagattcccaggaggtcaaatgacgtgggataagaaggatccatcgggcgctgatgcaatggataaggctcttcatgaaagagactaccatcaaatagattggaattcattgtctcaagatgcagaaggggcacataaaaatgcagaacagttaaaacaggaagtgataaaaactgtatcaggaagagaaaaagcaataatattaatgcatgatacttatggaaaagaggaaactgcaaaagcattgccagaaataattaaatatctaaaacaacaaggatatgaatttaaaattatgaaatagcctaatatgactatgttgattttcatttatcttaaattatgtagctacactttggttacataatttatagatgaaaatgacatagtttttttatataattggtacaaatattatttttatcaattaattgaaatagaaataattaatgataaactattaatatataattagatttgcatacatggaagcactaaggttataatttataacaataatcttaataatagaatgtatataattataatattactgaaaattatctttatattagaaataaggaggaataagatgttatcaaaaaatattgtagcagaggtattagcaaagtgcttagtaactggtggcgattttgctgagatatttgaagaaaattcaattaataattctatagcattgattgacggcaaagtagatgatgccataggtggaagaagttatggtataggaataagaatattcaagggattgaacagtgtatatgcttatacaaataataatagcttaagtggtcttttagacactgcctatagagcagctttagctttaggtgatgtaaataaaaatgaaataaattcaatagtattaactgagaagagtatatctacaatacatccaatattgtattatcctaaggatgttgcatacgatagaaaaatagcaattttaaaaagtgcgtataatgcagcaaagaattataacagtgatatttctcaagttattacaagttatgcagataaagagcaaaatattttaatcgcaaacactgaaggtttatatgttcaagatacaagaataagaacaaggttaggcataagtgcaatagcatcaaaaggaagcgaaaaccaaactggatttgaaggacctggaagacatatgggaattgaaatgtttgatagtgttgatccagaatatcacggaaaggaagcagcgagaatagctcatactatgctttatgcaaagaactgtccagcaggaaatatgactgttgctatagataatggttttgggggtgttatattccatgaagcttgtggacattctttagaagccagtgctgtagctaaaggaaattcagtttttgctaataaattaggtgagaaaattgcatcaacaaaggtaacagctatagatgatggaactgtacctaatgcttggggatcactaaatatagatgatgagggtaataagacacaaaaaaacattttaattgaaaatggtgttttaaaaggttatatgattgataagttaaatggaagacgtatgaatatggaggctacaggaagttcaagaaggcaaagttacaagttccaaccaacttcaagaatgactaatacctatatagcagctggaaatgataatccggatgatatcattaaatctatagaagaaggattatatgcaaagaagctaggaggcggatcggttaaccctgtaactggtgagtttaattttgcagttcaagaagggtacttagttaaaaatggtgtgattcaggagccagtaagaggagcaagtcttattggtaaaggtagtgaagtacttatggatatagatatggtcggaaataatttagatgtagctcaagggatgtgtggctcatcatcaggaagtattcctaccaacgtaggtcagcctatgattagagtaaagaaaatgactgttggaggtagataaatatggattttgaattatttaaagaagaattatttaaagaagctaagaattcaggctttgaagagtttgaaatatattattctgatgctgaaagtttaagtttaagtatttatgaaggtgaagttgaaaaatataaactaaataatgcctttggtctttcgttcagaggaaaaatcaataacaaaatgggatattcatatactgaaatattagacgaagaagcaataaaaactcttataagaaatgcaaaggaagcggcatttgctatagaaaatgatgatgaacagtttatatatgaaggggataaggaatataaagaattagactgttacaaaaaagatttggataatattaagcctgatgagcttatagctctttctttagaaatggagaaggaatgtaaaaaacaatgtgataaagttgtaagtttccaaggttgtggaattggatatggtaaagctacttatggaataataaattcaaagggacttaatttgaaaaatgaaagaaataatctaagtgcatatgtagttccaataatacaagataataatgaaaagtatgatggaacaggatatgttatggctaaaaagatagatgatatagatccaaaaagtttagctaagcaaggtcttgaagaagcgctttcaagaattggtggaaaaagcattccatcaggtaaatataagataattataaataacgaggccatggtatcactgcttggaactttttcaggaatttttaatgcagagcaagtacaaaaggggttatctttgctgaaaggaaaagaaggtgaaattatagcatcagatgtagtgtctataattgatgatcctcacttaaaggatgggcttggaacaacttcatttgatgatgaaggagtagcaactatcaaaaaagagataatatctaaaggaaaattgaatacattattatataatctaaaaactgcgcataaggcaggaattaaatccacaggaaatggattcaaagcttcgtatgcatcaatagtaggtgttagtgctacaaatttttatataaatccaggtgataaatcttttgaagaactttgcaatgaagttaaagaaggtgtgataattacagattttgcaggccttcactctggagctagtgctgtaactggagatttttctttagcagctaaaggatttatgattgaaaatggaaagaagagctttccggtagaacaaattacagttgcaggaaatttctttacattactgaaagatatagaggaagtaggaagtgacttaaagttcccgatgagtagcataggatgtccgtcagttgttgtgaaagaactttcaatagctggaaaataattttgttattaatttaatagatatgctaaggtaggttaaatagttatgaatataatctatatgtatcttttttcttttataatttatagctttctcggatggatatgtgaaactatatattgctctataattgatagggagtatgtaaatagaggttttttaaaaggaccattttgccctatctatggatcaggtgcacttatagtaattatattgctagctccattttcagataatattgtaattttattcttgagtgcaatgatttttacaagcatattagagtatttaacaggttttttgctagaaacaatatttaatcttaaatggtgggattattcaggctataaatttaatataaagggcagagtatgtctattaaattcagtgttatttggtcttttatctctaatcacaataaaagttattaatccaattataatagacttagttagtcacatatcactaaaggtttctatgtggatttgtgatatttcactcttatatttattaacagatgggataactacaacagttaaagttttgaaattaggtggaaaactcaaagaaatgagcgctttatttgatgagataagagaaaaaactgaaagctataaagtggttctacaacaaaatttaagcagatttgatggcttgatagaacaggaaagtgaaaaagttattcatgcaaaagaacaaattagcaagctaaaatttaaattagaaaatttggttttaaacaataaggccgtgaataaacgaataattaaagcatttccaaatataaagtctttgaagtatcaacattcactagatagattaaaagaagagataaaaaagattaagaaaaaataaaagagatggtcaaattttatttgaccatctctttactatagttaaaatatcattatctaattagaattatgagcataatttgcacgtatcattttatccgaaagatctaatgattttttataaatatctttttctttatctgttaagttttccccgcctttaagtgttccattagttattacggcaaaagatttatttgtatttaataagtttctacctaaaatagtgttctcgtacttatctttatcgactccaagtaaatataagagtgttggcattacatcaatctcgccattgtacattttatcaaatgtttttccttcatttgtagatggattatagataataaatggaacagtcggatttcctgtatttagataccaatcttctttatgagatagctgtccaatgctatcatcataatatttatgaattcctgtatggtcacccattattgctataatgctatttttaagtaatccttctttatctaattgatcaataaaataacctatttgtttatctgtatagtgaagactttcaaaatacccaccaagtttactttcatttaattcaggatcaagtccaagttctctgtacttttcaggaagatcaaatggaccatggcttgtcaatgttacagtttcagcgtagaatggttgctttaattcttttaacataggaacaacttgctcgaagtatcttttgtcacttataccaaggccaatttgttcatcaacattaaatgagtagtagtcagtaaatttatcaaaacctattccaagcaatccatttttataattccaaaaggaacctttgtcaggatgaatagcagaagtagcatagccttcaccttctaataaatttggtaacgaattataattagtatttggatatctaaagaatgtacttccttgtcttaaaggcaacattgaagtattaaccattaaatcagcatcagagcttgtaccttcatttacttgctcaaatgtattagggaagtacaatgatttttgtactaatttattcaaattaggtgttatttcttttccattaactgtttttccgataacaaagttttctaaagactcaacttgaatataaattaaattttttccttttgccatgccaaggtattcgttatctggaaggttctctttttttatttcaaataactcatttatatccgctttatcttgatctgttaatttatatggtttagaatctttataaactgtataacagtccataatatgatatccaataggagaaaaatatttggcagtatttgacttatcataattactgaataagtaagcattatgaacatctgtattattgaatacagttatactgataggtacataaattataaataatattggtaatacaaaagtacaaaagaatgttttaaatgctcgtttatgtacttgagtaaatgattttctggttatgtaagcatatatacctagtattataaaatcaaatacaaatataaaatctaaattgctggtcattgataatatacttccagacatattatctaaattagcagtttgagttaatattaatgcagatggaacagttaaaaaacctctaaaataccagacatcaactaatattaatagtgttaaagaaaaatcgattactagagtatagattattctgcctttacctttaaataataatgagaaacttaagaatattaaagtaaaggccacataataatttaagaaagaactagcagattcatagccagtagaaaaactaaatgtatatggatctttgctcgtaacaaatccttgaaatataatcccttttaatactatagagacaagagctattagaaagaaaattaatcttataaccttatctttttttatattattttctaagctatttttaaaaaaattaacaacatatgagttagaagaactcatgatttcacctcaattcaatatatcactacattatagtatacataaatttatggattaaacaaatataaattaatgatatattagtaattaaaaggtaaataatttgtgaataaaaaactatatataaaaattagcatggtatactattaatgtgggaaaacttatataatagacttataataacttaatttaatatatttttaaattaagttatatattagttaagaaatcgattgaaaaatttgatatattaattatatattaaaataattataaaggggtcaaacatatgaaagaaatagattgcagaggattatcgtatctacaaataataagagaagttaagaagtattttaattcaattggagaaggagaagctgttgtagtagtaaataatgaattagggcggtccaatgttataaggtatgcagcacataaaggatataaagtagatatggaggatgaaaaaagtagatttttaataaagatggaaaagagaggatgcttagaatcagaagatgaggaagaaattttttctatattaataacaagagataaaattggtgagggaaatgatgatttaggaataactttaatgagtgaatatttcgaagcattaaatgagtatgataaacttccaaaagaaattttattcttaaattcaggggttaagttgtttaaaagggattctaaggctatagaagatatacgaatgctatataaaaagggcgttaaacttttaataagtgatacatccttggattattataaattaacagaacaaataacttttggagaaatagcaagcatgtatgatatggtagttgcaatgaagaaagcaaagaaattaataaagctttaggaattaatggtggaggatattataatgccagattatgaattaattattattggggcaggaatagcgggaatgacagctgcacttggagctgcaagagagggaataacaaaaatactaattattgaaaaggagtctaacgttgggggaataatcaatcaatgtgttcataatggttttggaaaaaactttctagatgagccagtgaccggcccagagtatattgattttatagaaaggcagttaggagaatttgaaatagaaatacttttagatactacagttttagaagtaactgaaggaaaaaaagttacatatgtaaattctagagatggtattaaagatttaaccgctcaagcgataatatttgctatgggagcaaaagaaacatattcaggaaatgttataattcctaccaatggacttacaggaatattcactgtaggagaggctcataaaataattaatttagatggatatctaccaggaagaaggactgtgattatagcgaaaaataaatggggattcatagttgcaagaaggcttatagtagagggtggaaatatagaagcggttgtcattgagaatacatttgaggaaatggttaattcggaaatacgagatattattgatggctttgatataccagtaatagagaattctagagtaacagaaattgaagggaaaacgcgaattgagaagctaaaaatagttaatttagagaatgaagaaataatagaaaaggaatgtgattcacttctattatcagttaatttcttgccagaaacaaccgtaattaaaaaaacaagttttgatataaattctaagacatctggatttgaagtagtagactttgcgacatctttagagggtttttttgcttgtggaaatgttatatacggagaaaatgcgttttggatggaagaaactgatggtatacaatgtggaattattgcggctagatttgtaaaggaaagcatgtagaagttaggtagagatatattagcagtaatataataaaagctaaaattactgctaatcagttcacagaataatatggtttaaaaataattgagagcattttcatacattaggtgatggccaagtgaattcatgtgaattccatctaaataaatatcatccctattaaatgtcaaatcgtagaaattgataaattgaagagtgtatttattagataatttaatgagttcatcctttaaatattgaagttctttttctgcataagaatatagatgcgagggagaaaaaagcgaatttgccatttggccaataatcttagggggaattcctaaagtcacttttgagcctatatttagtccatcattaatcattatttcaatattactaattataaaaggaattttgcgtcctagaagaagatcattgctacctcccattataaaaattttcgatggagaataaattaaaacatcatcattatagcgagtaagcattgaagtggtagtatcaccattacaggctttatttaatgatgaaagggagcgttcttgcgtaagtttgtaaacccaagaattttgtttagttaccccatatcctaaagttaggctgtctccaaagaaaatgatatcaagcttattattcatatatagactccttttatgtaattagaatagtttgttaaagcactttttacatattaatgtttttcctgaatcggcttttacataatcatctgaaataatggctttattgcagatgctacatataatcatttcgctagacattaatgagttagatgaggttttttttgattttttatcacgtttattttcagcattgcaatcaagtttatctttttgataattagttgcagaactactagttttatcagatagtatattttttcttattggagaatataatttaggttttaaggaagtagttcttttgacaactttatagctaaaatcatattcactttcagcaaagagttctagttcaaatcttggattttctttatcataatattcttctgtaaagatttttgttatctgagcatcatttataattaatccacttttttcaatgccatcaaatatgctttttgtaatattaatggtatctggatgacgcttttcacttttataatatactcttagtaaagctattagactttcagaaaaaacaatatcaggattttgatttcttgcaagaagtgctatttcctgttcgtatagagcatacctatcatgatattttccagagctatgtggtaggattgcacgtccatttagattgtgtaacttaaaattagattttgtaataggtgatcctttaattataactttagcatagttagacatttaaattctcctcgtgaaagtatatttgttatctcaaatatacatcatatgtaccctttatacaacaagttaatattgcaatgaaattgtgagaataagatatatgttaagttcatctgcataactagaaaaattgaactttgataatattgtatagataaagtataatattttagtaattaaaatatagaatagtttgcgcattgaaaagatatgatttcataaatattaagaagatattaaacaatatataaatacgagattttatcttttttttaagataaaatagatttagataaattaaataatgttatagtaaagtatttaatttatatagttcttaattttaactaatatatcaaagttttctcttgttagattagttaaaattaagttataaataggattaatcagcctatttagatagatcagaataaataattttatttgaattgtaataaaaagaggtattagatatggataaaaaaataattttagcaatagaatcaagttgtgatgaaactgctgcagcagtagttgtgaatggtagagaagttttgtcaaatataattgcatcacaaattgatactcataaaaaatttggaggagtggttccagaagttgcatcgagaatgcatattgaggcagtagatagtgttgtaaaagccgcattattagaagcaggaatttcaatagacgatgttgacgcaataggagttacgtatggaccaggacttgttggggcacttttggttgggcttcaatacgcaaaaggattagcattaggttctaaaaagcctttaatcggggttaatcatatacaaggacatattagtgctaattttattgagcataaagatctaaaaccaccttttgtatcactagtggtttcaggaggacatacttttattgtgcatgtaaaaggatatagggattttgaggttattggccaaacaagagatgatgcggcaggagaagcttatgataaggtggcaagagcattggaacttggatatccgggcggacccaaaatagataagctagcgaagcaaggaaataaggatgcaatagaatttccaagagctaagtttcaggatgatacattagatttctcttttagtggagttaaatcagctgtattgaattatttaaataaagcaaaaatgaaagaagaagaggtaaataaagctgatattgcagcgtcatttcaaaaggcgataatagatgtattaaagaccaatttattcttaacttgtgagagaaagggaataaaaaagattgcagtggcaggtggtgttgcatcgaattcttgtttaagagaaactttgctagaggaaggtagaaaaaaaggaattgaaattctatttccatcacctatattgtgtacagataatgcagcaatgataggaagtgcagcatatttcaactatcaagagggagcagtatcagatttaaatataaatgcaaaacctaacttaaaactaggggagaggtagagtctaggtatgaagctgttatcacattctaatggagtacataaggttgagaaagataaaaccagcaaaaggagcattttaaaaaaatgtgttatcttttttgtgggattatttatctttggttttttagtgcaaattttaaatgactttgtagataatacaagattaaaatctagatttaagtatgtcagaatagatggacgtaaaatggagtataaacttaagactggtggagattatactgtagtatttgatggatcaattggaactacaatgtatgagtgggatgatgtttgtaagtcattagaggagaagaagatatctacctttacatataatagggaaggatatggatttaatgatggcggggataatagaacaccagaagagcaggctaaggatttgaaagcattgcttagaaaagctggagcaccagagccatacgttttagttggagaggagtacggtagtctggttcttagtaattttgccaatttatattcagattcagtagcaggagttgtgttaattaacccaatatcagaggaaaatattcaaactaaggaatttaaggatagtattaaatccaaatattatagaagtatgtttgagaaaatcggtacaaattttagtttgactgcattgttaaataaagcagggctaactatggaaaatgatacgtttaagaagtatttaaatcagaatgaattagatgaatttcagagttttgaaaataagaaaaattataaacaggcagtttcaaacgaactagaaaacttatataaaggcatttcgaacagtcaaaccaatgaactactaggaaataagccattatatttaataactaataatgaagctgatcctgttaaaaagattggtaatacaacagtaacaactatatataaagaggaaataaagggatctccaatgtctgtattagatcctaactcagtggttaccggtgtgaatagtgttttaaaagatgctaagaaggcagctaaaaaatcttgattctaataaatatgtatattttcttaaatattaagtattattgaataattaagaaataaagcttctattgggctaaaattcataaaaaattatatcaaattatatattcttgtcatttgtttgacacataataaatctatactaacactataaagataatactagtagacatttaaagtattctaatatactttataagaaccaatttgtatagtttaattactagtcatataagttgagaattgatatataggaggaaaaatacatgaataataatgataataatgaaaaatttattgatgtagagtcattaccagtagataaaggtcagcaagttgcatgggaaaattgttttcaaaatagtaataattatgcagatccgaagagaaagaaaagaagaggtctacgcatgctaggaaggattgcaggaattttagttcttacaatggtaggaggggcaattggaagtgctgctacttattcattcatgaaaactaataatgttgctgcaactaaacaaataacaagttatattccacaatcattcacatcgagtactcctgatgcgatgtcagcggcagatgcatttaataaagttgcgccagcagttgttattgtttcaacgaaaggttcatctaacaatggattcatgaacggcgaagttgaggggatgggatcaggattcattataaatgaagaaggatatatactaactaactatcacgtaattgcaaatgctaaagaaattacagtaactttaagtaataatactgaagtaagtgcaacagtagtaaattacgatcaagatagagatgttgcaatgcttaaattaaaagacggaactaaagttcctgctgttgcagaacttggagattctgatgaagtatatccaggagctgaggttatagcaattggaacacctctttcaaagaactttgctcagacacttacaaagggagttataagtggaagcaatagaacaatagatgatagtgggaaaagtgtagatttcattcaaacagatgcagctattaaccctggaaatagtggaggtccattagttaatgctaaagggcaagttataggaataaattctatgaagataggttctgatgcatcgggatcatcaacaccagttgaaggtatagggtttgcaatacctataaatgaagttaagaataagatagatgctttatcaaaacctatattaaatctaggaattcaaataagagaaattgatagcgctactgctaagaaatacgatttggtagaaggtatatatgtatcttctgttgaagagtattcaccagctgaaaaaggtggtcttaagattggagatataattgttaaatgtgacggaaaagaagctaagaaattcgatgaacttaaggcaataaaggaaagtaagaatgctggggataccatgaagatagaagtaattagagataagaaaactgttgacttgtcagttgtattagaagaaaaatctaattaaaatccttctatataaaaattaaatatatttgattattaaaactagaattgataaatataatattatcaattctagtttttattgcattaaaataatattctttaaaactttaaggaaaagtagtaaaattaaagattataagggtaaggtatcttaatttgatagttttttgatatctaatggagaaggggataaatatatggaggaaataatattaaatataataatgcacagcggggaagcacgaactttttctatggaagcaattactttagctaagcaaggaaattttgataaagcaaaagggttaataataaaagctgatgaggaattaggatatgcacataattctcagacaagtttaattcagggagaagctgtaaatgagaaaatagaattctctttgcttttagttcatgctcaagatcacttaatgactacaatggttttgaaggatttagcagttgaattaatagaagtgcatgaaaaaataagttctattaaatagaggtatataaatatgaaaaataaaattaaatatgctattgtattttcaattcttttgctaataggaatagtaagcattaatctatttcaaccaaataaagagcaacaagttagaggaaatatagagctcttagtaaatgagaattcctatgagtacttagttgagtgcgcaaataattttatgaaggagaatgataggacttcaataagtgtaaagaagttagaaaattacaatcatataattaataataattcagatggaagtacgaaatcaaagatttctagtatagcgcagatagataggtttagttttgataaactaaaattagataactatgaatattataacaaggatgataagctcttgagcgaatatgctaagaatttttctaagtatagggtagctcaggttaaatatggtgataattccataggaatacctttaacatctaggccattagctttctatgtcagagaagatttattaaaaagttatggatatgaacgagatagtttgaatacatgggatgatatcataaggattggaaaagatattcatgaaaaaagcaacggaaaaatatttataattaatgcgactgatcaagattacgaagatttgatggatctattaaccatggaaacattaagtgatggtgataagagcatagatgcagttaaatcagaagttcaagctatgatgaaaaaattagaggataataatattttaaacttacaaagtggaggagaattcttagcaagaatatcgtctattaatgcaatgaaagaaatagcagcattagatgttccttgtacgtggagcgttaataacgtgcctagccttaaaccaggggctaataagtttttttcatcggaaggagataatttattaatattaaatcaaaacagcgagaatgataagctaattgaaaaatttataacttacgtaataactaacaacaaggaagctgttaaatatgttaaggaaggaaagtttttctcaagctatttatatacttataatactaaagatattgaggagccagtaaaaaattttactggaaaaagtcctcttgtagtattaagtaatatagaagaaaaaactccaatcataagtaattatgatgaatatataaagataaagcaagagattcgagcaaataccaattaataatgaaaatttatataaatagttttagattatcagcattataaggaaaacagtaaggtgtttcttataatgctgaatttattttaatatagtatttgaaatatcactctgaattcacatttaatttattattaaagatttaaataattataaaagtctaagatattaaacttctataggcatttaaggtattcttggcagtcttattccaagtaaagttaaggcttcttagatatcccttttcactaagctcagcttttaaagtttcattattcaaaagatcaactaaggcattgtctaattcttctatattataaggatttatcaaaatagcactatcaccagttacttctggaatagaagttatagaagatgttataactggtgccttacagctcattgcttcaagcggaggaaggccaaagccttcatagaaggaagggtatacaaatgcatcacacccgctataaagaacaggaagaatatcatcttctatatatccacaaaaaacaactttgtcttgtaagttattttcttgaacaaatgaaagtaacttttcaccttcatcttttaaagggcccccaagcaataacttataaggcttattcaagtctttataaactttacaaaatgatttaattaatcctaaggcatttttccttaaactaaacccacctatatataatatataaggatcatcaactttaaatgtgttttttacgtatagcttacattgattcttatccaaaggtttaaaattattattagcggcaagtggagttacaaatattttttcttcaggataaaaactaaagaatttcaatatatctcttttagagtattcagaaactgttagaatgccgcgtgaattagaaattatatttggcatattatttaaaaatcgttctaggtatcctttgccaacagtttcaggcattatatatgggattagatcatggattgtaactatagttggtatttttgtatcaaaatcgagtcctattccgttttgaggaatatggtataggtcagcatggaccttgttaagtgcattaggtatataatatttttcataaaaaccgccatgtctacctgaagaataaattatattaacattttccttattgaattctttgttaaattttccagagcaaaatagagtgaattcatcattcgaatctaaagaaagaatctctgatataagattactagtataagtaccaattccagttccttgatgtaaagtggaactacgagcatcaatggcaattttcatatgaacacctcaacaaattacatatataatacagaatattattagtttttaatttttgtgaatataaatcacaataaattatttgagcacatataataaaaataaataatagctggtaggaaaaagtttatggagaataataaggagatacttaaaattaaaggctatattgaagaaaattataatttaaatgtagaagatattgaaaaagttaaaaatagttataaagttattacaagggatgagagatattgtttgaaagtagttaaatatgaattctctcatttttattttatcttatctgcaatgaagcatttacaaagaaatggatttggggatattcctgaatttattatgaatagagaaaaaaaagaatatgggaacataaacggaaagtatgcgtacttaacaaaatggattccatcgagagtaagtaattatgataatccaatagaattatcaatggtatcaaatgagcttgcaaaattacatgaatgcagcaaaggatttacattgaagaaagagatgaaaccaaggattggatggttttcatggatagatgtttttgaaacaaggagaagagaaatactggattttaaaaatagaataagtcaaaaagcatataaatcaaattttgatttattgtatttggacaatatggaaaaagaattaaatagagcagaaaagagtatagtaggtcttcaaaaaaataattatgtaaaggttatggaaaaggaagttctttcaaggggattttgccaccatgactatgctcatcataatatattaatagataataagaaaaatattaatattatagattttgattactgcatattagattcacatctccacgacgtatcttctttattaataagatcaatgaaagatggaaaatgggaaagcgacaaatgtaatctaattttaaatgcctatagtgagagaatagaaataagaaaagaagagctacctataattagagaatttataagatttcctcaggctttctggcaaatagggttgcaggtttattgggaacagcaaccatggggagaagaatttttcatcaataagttagagaagtacttaaatgattgtgaatttagagaaaagtttattgatagttattttagtgggggaaattaatatggatgaattattgattaatcagtatttaaataaaaaaggaatagctattatgggacaaggttttagttatgataaaaatatgcaaagaaatgatatagtttctcaagttgatttaattatagaatttcataaattgctattagggggtaatctaacagggctaagcaaaattaaaagcacaataggcagagaagtggaatcttataaagtgcagataagaaaactacaaaagaattattcatatgtatctagtaaaacatgtacaaatgagatagagaatatcatattatcaaacggaaaaataatgttggaaaaagctaataaggctataaattatatttatgaacatgactactttggagttataagacgtagtatgaatagagaagaaatctgccttggtaaagttgataaaagtaatttaagaaaaaataatgaaaaaatagaagtgtgtacaataaaaggtatgacatataacttggtagaagaagacttatataattatattaagaaactacaaagaaaggaaattaatatagatgaggaagaactaataaagttatttgtacatggatcacacctatcatttaacagctttgattatttaagagggctttgcagttatccaaaggattttttaaagttttgggagaggtatagagatagtagaaaggataatacaagagaaatttataatatacaaaatgaggaatgtaagggtagtaggaaagcaaggaatgacgaacaattattaaatggattgaagaaaagtttaaagtatgaaagtaaaaattttatcatataggtaaccaaaggtagttattgtttatacctaaagcttagttgttaggaggaagaatatgaatagaactaagtattcagaaaaaaattatttatgcgattatgatttgagcctaaagttcttcgaagaactgggaataaaagtaaacgacattgttccacttagaaaagtatttttggtatatacagatgaaggaaataaaatattgaaaagagtaaattatgatgtagatagagtcaatttaataagtgattctttagactatgtaaaaaagagttatgaacatgtaataacatataaaaggttcaaagatgatttatgttataaagaatggaatggacaaatttatattgttatggatatattgaatggaagagaagcatcattttctaatccagtagaaattgatctttgtgcagaaaatatagctttaatgcataaagcttcaaaaggattaagagaatatttgaaggataaatacaaaaaagattttttagatatatctttgaaagataaaattaaagaagcatatgatgatttaatttggatgaagagcttagtagatacgtataaatataaaaatgaatttgataaattatttgtaaataatgtagataagtatttaaatgaaattaaagaggttcaaaatgaccttgaaaaaagctcatatgataacctaagacaggatggagatactattcgtttgtgtcataatgatttagcttatcataatttcttaaccaaaaataatgaaataaatataatagattttgattttatgactatagatttaagagtaatggatatatggaattttattttaaagtgtataaagaatgccgcattcgatgtggataagatgtcaacttgtattaatggatatgagaatgtgtccattttaaaaaaagaagaaaaagaactcttgtatatacttataaagttccctaaagatttttatacaatatcaagagattattatcataagagaaagaactgggaatatgaagtatatttaagcagatttgaaggaaagttgagcaatgaggactttagatatgaatttttaaaggttttagaaaataaatttttcataggtgctgaagtaaagaagtaatttaaatataagtttaatttatttgaatgcaaagaataatataaatctaatttataattgatctatttataataattgagccaatattttatttcgtaaatagaatattggtttcttattagttaaaaaatattgagaatttataaaggcaagaaaatctcttatgattttcttgcctttatacagatatttaatagaaattgtttaattgaaactgttgtaatataaattacttataaggtagctaattacaaaaactatgaaggaattttactagttatataaaaaatataaattttattttatatagttagtgtattattctatgaatttattatagcttcataggcggatattgtatctagagctgttttattccaagaaaagtttttacttcgcgttaggctttttttgaccattgttaaccttaataagctattacttaaaactctttctatgtcataagatagtgaatcaatatcattaggatctataaaaagtgctgattcatgacatacctcaggcaatgacgtaacattagaagctattacaggagtgccacatgccatagcctctataggaggaagtccaaatccttcataaaaagaagggtatacaaggacctcagcagcgttgtaaaacaacggcatatcttcaatgggaataaaatcagtaaaaataacgttattagatatatttaaatcatcagctctatttttgtatttagtataagaaggacccttacgaccaattataactagtttgaaactttcttttaatttatttgggagtttagaataagcttctattagtcctataatattctttcttggactaaatcctccaacgtaaagtacgaagtcttcctttatcccatatttctcggtaataaagtctttagatctacatttactcataggtctgtaaatatcttcagcagctaattgggtaacataaatcttttcagcaggaaagttaaattccttagcaatatcatccttagagtaattagatacagtaattattccatcacaattatctaaaattttaggcagttcattattaaatatttttaaatatctatcactaacagtttcaggcattcttaaaggaattatatcatgtagagtaataacttttttgcattcaacattttctgatagaccaaccccgttttgtgggacatggtaaagctctatgtctgcattatttaatatattgggaacatttatatcatcccaaaaactattagaaggtattgattcaataagttctgttttaaaattattctttaaatcgcttataaagtcacattgtggtgtgaaaattaaatagttattgttactatcaacattgttgaggctagatattaactgataagtataggtacctatacccgtgcctcgataccactttgcagctctaccatctattcctattttcattattaaaccctttcatagcatttgtcttaatgtattatattaaaagaatataaaaaatgttaataaaagaaatgatatcctcatataaatatacaggaggtgagaagtatgatgagggaatttgaaattgaaagacaattcaatataaagatagaaaaaattaaggcaaataaaggcgtatactatcttaaaacagataaaggcgagagatgtttgaaaaaaataaattatggaccccaaaagttgttgttcgtgtatggtgctaaagagcacttaagaaaaaatggttttaataatttagataaatactatttaaacataaatggagagccttatgcattggttaatgaagacttatatactttgtctgaatggttagaaggaagggaatgtgacttccataacatagatgaagtaaaaatagcagcaaagactttagctaatctccatgaagcatctaagggatatgatccacctgagaattctaagctcaaaagtgatcttggcagatggcctcatttaatagaaaaaagaattaaatctttagataaaatgagagatatggtaaggaaaaaaagtataaaaagtgattttgacatgctttatttaaaatctatggagttttataaagagatcggaaagaaatccttagtaactttaaatgagtcagattactatgagttatgtgcaattgccgagaatgaaaaaagtttttgccatcatgattttacttatcataatataattttaagcgatagtatggatgtacatgttatagattttgattactgtaaaagagaagttagaacttttgatataagcaattttatgataaaggtgctaaagagagttgagtggaatttagaatttgcgacagctattatagaatcctatgattcagtatcaaaattaaaaccagaggaatataaggtattatatgcatatcttcaattcccacaaagatattggaggcttgcaaatagatattattataatgaagttaattgggggcaaaatacatttgcaggtaagttagaatcaataatacatgagcaagagaaatacctagaatttttagaaaaattcaagaatgaatataagatataataaacataataatatgaactaccgaaataattaaaaaattatttcgatagttcatttattttgttattgcctagatagaataaaatcattcttatattaatttagaaacctttaataatctttaccatattataatgtgaaagaatgtattaggagaaagtaatggaaataggagatatagttgttagaaaatcttataataaagatattacttttaaaataattgatattaaagatagtggcggaaagtataatataattctaaaaggaattaatataagaataatagcagatgcaagtttggatgatcttgaaatggcagaagaggacactggatctcaagataaaatattaaatacaagagttaatgaggccataaagaaagctatgatactacgaggtgatcttagggataaagttgaaaaatctcctaagataaagacgaagaatgaattgatgtttggaaggccaggaaagattctccatgtagatggggatagtgagtacatggagacttgtttaaaggtatataagcaattatctttagatgcagtggggagagctatagcggaaaaagatcaaccagaggtaatagtagacttagttaaagaaataaaaccggacatagtagttttaactggacacgatagtgttttacgagaaccaagggattatttgaatttagataattatagaaattcaagatactatttagaatcagtcaaaaacttaagaaattataattcaagttatgatgaattagtaatatttgcaggggcttgtcaaagttgctatgaaagaatattagacgtaggtgctaactttgcctcgagtccaaatcgagtattaatacactgcctggaccctgtttttgtatgtgagaagattgcttatacaagaattgataaggtagtatcaataactgatgttattgaaaatacgataacaggaataaagggagttggaggattgcagacaaggggaaagtatagagaaggatatcctaaatctccttatatttaataaataatttagataggaattgcataaaataaattattaaaaacttcaatgcatcaaagtaattagtaagagtattgaagtttttaactataattaataaatatagtatttctatttgacaaaaataataatagaatatataatgattttaacaaatttaattttataaaatataatttatgaagatataagtttattcacttaatttcatattaaagatgataaggagagaagcaaaatgatatatgattatttagtaaaagatataaatggaaattcggtttctatggagacatacaagggaaaggtattactaattgttaatacagctacaggatgtgggtttactccacaatacgaagggcttcaaaagctttatgataaatataaagacagtggatttgaaatattagattttccatcaaatcaattctttgagcaagcgccggggactaatgaagagatatcaaatttttgtaaattaacatacggaacaacctttaaaacatttgcaaagattgatgtaaatggagagaatagtgatccattatatgtttttttaaagaaagaggctcctattgcaagcgaagatgatgcatcaaagggattgtataatcttttatcagaaaaaggctttaatacaagtggagatgatattaagtggaattttacaaaattccttgtatcaaaagagggaaaagtaatagctagatttgcaccaacatatgaaccagagaaaattgctgatcaaattgaaaaattaattaatgaaaaatagagaataaatataaatacttctttaatgtacgtgtgattaaaggagtattttatagtaaaaaatatttttatatgattaaaaaatgtcatttggtattgttgagaataaattctgaacggagagggaattccagctttatataaaatgtctactaagattttcttaaaaaatatagtaaggaataaaatattgaccaatattaccgtaagtagtattggtcaatatttaacattggaaatactcgaaattatgttaataggataagagtatagaataattgaagggggaatagtttatagatataacattgagctaagaaagatttttaatataatatctgattttaaattatatacttatctaagtatgaacatggaatcaatttaaaaataaaattaaggttatttatagattatgaaatgttatagaattaaatttaatgataaggggaataataattaagaaaaagcagataatataataaaatagcttgaaaacatatataattggaaaaatgtttacattgacaatatggtgctataaatgataaaatatttattttacttgactaatttatgattttgttatataattagtatgaaagagggtgtttacatggaaaaagttaaaactattgcttccattaaaaacgatatagagagacacgtcggtcagaaagtgactctaaaagctaatggtggaaggaaaaagattttagttaatgatggtataattgaaagtgtatacccaagtatttttgttataagattaaaaaatgacacccaaaggaccgtgacttatagttattcagatgtattaacaaagactgtacaattggtatttccaactagaatataagcttcgattaattcggagttttttctttttgttttatttttaagtgagtttttaatattcatatttatttaaaataattaatgaattagaaattgtgagaagtgtttttatacgtagaaagccataaatagaatataattttatgattaaaaatgataataggatttagattaactaaataattttataaaaaaagaaagatggtgggtttccatctttcaactatggtataaaagggtattgagaatttatgagaggttatatggtcaataaccaattactatattacgacaaaaaatagtatatgtcaataaaaaacgcaaaaaaatttaaaaaaatattgttaagtgaattaagtaaaaggtttacttaatttgttagaataaaataaaaatatatttatcataaatttctactcatatgtatataaatgaatagtaggaattttatggaggtataaaatatggcagatatagatattgtaaaagaaaatgtacagtttgaacaattgcttagggaaaataatacgaattcggtattaaaagatgaatacttaatccctgatacccatcctgatgtacaagagatattaactgttgaagctagaccaatggtaactaataaagaaataattggagataaagtagttatagaaggaaaggttgagtacacagtaatatatttagctaaagaagagggactcgcagtaaattcggtgaattataatcagaactttacaaataatattgacttaaatcaaggggaaaatagagtaatttgcgaggcagagtgtaatattgaacatattgaagcaaacataatgaatgagaggaaaatatctattcagggtatagttactgtagattgggaactttacaagagcaatgaatttgaatttgtaaaagatattgagggcaatgatcaagtagaagtattgaaaaaaacagagacaattaataaaatcaatgcaacagaggatgttgaattagtaggcaaatctatgattagagttggtatggataaaccacaaatcagcaaaatattaaagtgttccttactacttcataaaaaggaaataaaaataacagaagataaagtttatcttggctgttactgcaaattaaatatactatacaaaggagaagattctaaggaaataattccattagaagatgatatttatttatcaaaagaggaagaaattaatggtataacatcagatatgattccaactgtttcctatgaaatatcaaataatgatttaatgttggaagaagatgatttaggcgaaataagaattataaacgatgagcttgtagttagagcaaatgttaagatattttcaaaagaaaacatagatactattaaagatgcatattctaccaattgtttgcttagtctcaaaaaagatgaacatgaagttggaattcttcatggaatgaataattctgaagcaattgttaagtataatattcaattgaaagataatgatttgagacctgaacatataatatctgctaatggggctataatattaacagataaacaagttgtaaaagacagagttattgtagagggaattataaaagcaagtatattgtataagacaactgatgaggagaaatacctatcaagtgttaaagcagagataccattctcagctgcaattgatatagcaggcgcagatgaaaatatgaaatctataattaaaagtaatttagaaaatattgaagcggctatagaaggaaataatatagcgattaaagctactgtgatactatctggcagagtattgtatgaaatgaataaagaatttgtttcagatgtggttgaagaagagggcgatattccagaaaagaaagctagtattactatatatgtaattggtaaaggggatactttctggaacttagcaaaaaaatataatacaacagttgacgatttaattaaaataaataagattgaagatccagaacatattgaagaaggacaaaaattgataataccaggaagggcaatattctaaaattaattaaatttataaaaaaagagatactttaagaatttcattagatgaattctggagtatctctttttttatgaagcaatattattaagctctaaaaatagaaaaagtttttggatatgaagaaaaaatatttacataataaaatgaaaaatacacaaactaagttttgttttatagttgctaattacttcgaacttaaggaagtaaaaactagagaaattattcttataggaaacgtggtttggcatttgcagcagccaaatttcttgaataattatttaatctggtggatagaatatgtaatgcatgatatgaggtgagaaaatttgaaaaaagttttaagtggtaatttaataatcattggaggagccgaagataaagaaggcaaaaaagaaattttaaaaagagtatgtgattcaattgacaaaagtaaagatactttattaattgcaactattgcaactgattatcctaaagaggccgcaaataaatataaagaggtatttggagaacttgaagtaaaaaatataaaggtattagatataagtgagagaacagaagcatctgatgatatgaatgtagagctaatcagagattcttcattaatattttttaccggtggagatcaattaaaaataacaagtttaattggcggaactccggtttatgatgcattagaagaagcttggaagaatggtgcatttatagtaggtacttcagcaggagcatccgtaatgagtgacacaatgatagttcaaggggaagatgatgatgatcctagaaaatgcacattaaaaatgtctccaggtcttgggttgattaaggatgttataattgaccaacattttgctcaaagaggaagaatagggagattattaacaggaattgcacaaaaccctgaggttttaggaataggaatagatgagaatacaggaatagtagtaaaccaatctggaatgatagaggtaataggtgaaggagcagtttactttattgatggtagtgcaattacatatactaatgtttcagaattatatgcagatgatattttgagtatgcataatgttaagttgcatgtattaactgatggaaataaatttgatcttataaaaaagtcaccttttgaggaggaaaagtttaatcatgaagataatacaaaagagaatatatgaaggccaaaatatttattctcataaaaagtgtataagaatagatatggatttggaaggatattctgaaataccaagtaaggacataccgaattttaattttaatcttgtaaatataattcctgaattaaaaaatcatagatgcggaattgatgaagaaggtggttttgttaaaagactaaaagaaggaacttacctagcgcatatttgtgaacacactatgatagcgatacaaaataatttaggaatagatgttgcttatggaaaggcaagagaaattaaaggtgatatgtattatattatcgtacaatatgaatataaaaatacaatacttgaggtggctaatttagccatagatttaatgaattctttgatcgcgcaaaatccaataaatttcgatggaagaatgaaaattatacaaaatatattgcaaaatgagcaaatgggtgcgactacaaaagcaatatgtgatgcggcaagggaatataaacttcctgttatgcaactaggggacagcaccatatatcaaataggatatggaaaagctggtagaattatagaggcttctataggaaacaagactagttgtgtaggagttgatatatcttgcgataaactcttaacaaaacagttgcttcaaactcaaaatattcctgtagcagacggaagtaaagtgcttaatttaattggattattacaagaagcagaacgaattggatatccagtggttttaaagccacaatgcggaaacaagggtcaaggagtaatactgaatataaaagatcaaaaacaattagttgatgcatatattaacttaagaaaaaatcaaaaggatataattttggaaaaatactttgaaggaagcgactacagagtttgtgttgtaaattacaaggtggtagctgtatcattgagaattgctccatatgttattggaaatggaaaagatagtttaaggatgttaatagatgttcttaataaggatccattaagaggagaggatcatgaaaaagcattaaccaaaataaaaattgatgctgagttaatatcatgcctttctaaaagaggattggaactgaactatatccctgaagagggtgaaaaaatattattaagagagaatgcaaatctttctactggtggaatagcaatagattgcactgatgaaatctgtgaggaaaatatagaaagttgcataaatgcagctaaaactttagggttagatatttgtggagttgatatttgtgcaaaagatattagtgttccgcttaaggataataatggagtagttttagagataaatgccgcaccaggtataagaatgcatcatttcccttcaaaaggtaaaaggcgtaatgtgggaaaagcaatacttgaaacgctttatgatgaagagcctaaaaatatacctgtaatatctattacaggcactaatggaaagacaactactacaaggttaataagtcatgtgctaagaaagatgggaagcaatgtaggcatgacatcgactgatggtgtatatttgaatgaaaagtgtatacataagggagatgattctggatttaatagcgcaagatcaatactgatgaataaagatgtagatgtagctgttttagaaactgctagaggaggattggttaaaagagggctagcatatgagttggcagatgtagcaataatcacaaatataaccaatgatcatctgggcttggatggaattaattctattgaagagttgagttttacaaaagctttagtgggagaagcagtaaaagatgatggttttgttgttgtaaatgctgatgataaatatagcaaaactgtaataaatagattctcagcagaaaaaatttattttgcaaaagataaagaaaatccgttgatacaagaaaatatagctaatggcaaaatagctgtatttgttgaagatgataaaatttgcgtaattaataataagaagaagtatgaaattgtatctactagagagttaccaatatcatataatggaacattagaatataatatagaaaatgcaatggcagcttgtgcagggcttgtaggcttagaagttgattattgtatgatttcaaaaggttttatggattttggattaaagaacgaagataatagtggaagatttaatatgtacaattaccttaatagaagagtcatattagattatgctcataatattgaaggttatagagcgattatatcttcattgagaaagattaagggagataatgatttaattggggtaattggaataccaggagatagaaaagacgatataggatacgcaataggagaaatatgtgctaataattttgataaaatagtaataaaagaagataaagataaaaggggtagaaaatctggagagattgcagatatattagaaaagtcaatattgaaaactaataaaaatgcaaatttaaagatttgtctagatgaagttcaagcgttaaaatatgcaatagatataagtaataagggcgatataattgtggtattctatgaaaaattagattctcttttggagtttataaatgaggaaccaaacaaacagctagatgcgttcgatgaagaatataaacagtacagtaatacattataactcttaataaaagatttaaagttatctaaaattgatcgcatagtagaatgtttaatagacattattaatccttttttaatttattaattagacaagattttttacctatgataaaatattgtcaaaatgttaagaaaggaataagataatgaagattaaggcttatgccaaaataaatattgccttagatattgttgggaaaagagaagacggatatcatatattaaaaatgataatgcaaactatagatttatatgacataatagaaatagagaaaactgaatctgagataaggttaaattgtaataagcactatgttcctacagatgaaagaaatttagcttataaagcggcgaaaatatttaaggaaacttattctattagtcagggagtagatataaagttaactaagaatatacctgtttcagctggattggcaggcggaagcaccgatgcagcaggagttttaaagcttatgaataagatgtttaatgtaaatgcaagtgatgaagaattgaaatctatagggctaagactaggagctgatgtaccatattgcataaaaggtggaacagcactgtgcgaaggtataggagaaaaaattacccaattaaaatcatttaaagataaaataatagttttagtaaagccaccttttggtgtatcaacaaaagaagtttataaatgttttgatttatcaaaagttgtatttcatcctaaaatagatagtttaatagaaaatatgaataatgatgatgtttattttgtagcaaataatatgaaaaatttattagaaaatgttactttaaggaagcatagagttattactaacattaaggaagaaatgaaatctattggatctataggtacaatgatgagtggtagtggaccaactgtttttgctctttttgatgatatgctaaaagcgcagttatgttatgatgaaatgaaaaaaaaatataaagatgtatttataacaagaacaatttaattcaaattgaatgtataaaaaacctccaagtggtaataattttagctacaagggggtttgttcatgataaaatatttgaaattaaaaaaaatagtattggtagttttaataacattaagtataaatatattttctggatgtacaagcattgttagaggtaatagtacaagtttggtaaatagtttaattgcaacagaaagtaataaaaatgataataatatgagggttctcaattacgacgaggttaaagattcattaataagatttcatgtaattgctaatagtgataatgatgatgatcaacaattgaagttaaaagttaagaatagagttatagattatctatatccttatttaaattcttcacaatcattagatgaatcaagaaaaattataaaagataagatggaagatgttaaaacacttgcacaacaagtaattaaggataataattatgattatgatgtaaaagttgaattgtctagggaaaattttcctgataagtcttatggtaatatcactttacctcaaggaaattatgaggcctttagaataattataggaagtggacaaggtagaaactggtggtgtgtaatgtttcctccattatgttttgtagacgaatcaaaggcacaagtggaatatgataaaacagagaataaaataaagtcaaatggaaaaagttttgaattagaatctaaagacgattcaactgaaaatgtaggggataagcaggcagatggaaataatataaagataaagtttaaaatagtggaaatatttcgagatatatttaaataatattaataggatatttggaagttttattcacgaaatttatatagttgtcaaatgaatttaataaagctaaagcttatttctgaaagtcaaaaataatattcaaatataatatattataagtggaggagaatatgaagaaaaaagctattataacggtggatagttatgtattggataatgaagaggatcttgtaggggtagtaactccaggagattttcatgaaatagaagatggatttaaggtagagtatgaggaaacaaagctttcagggatggaagggacaaagactactataataataagaaatgattcttttgatttaataagagaaggcactacagaaactaaaatggaatttagaaataatcatagaacaatatctctatataaaacgccgtacggtgttatggatcttcaaatagatactaaaaaacttaatattgatattagtaaagagggcggaacaataaccgcaatgtacatactagaaataggtggacagcctgcattgaagacaaacttaactatcggtgtgaaattaaattaagtaggttctatatttatttaaatactccctttgtataaagagatttaggaataagttgattaaattagaaaaaaatgggatataatatcaaagggaggaatatatatgcaaaatggattgaaatatatagagatattgaataacatatgcaaatattacggaattgatgaagaaaattctatagaattgctaaaaaatagagataataaatatatattattattattattaaaatataatcactgtttagatactgagagagttaaggaagtttttaatctaaaaacttctaagagtataagtaacaatttgaaactagcagaagaaaagttattaataaatagactttttagagagaagtactttgaattagaagataatataggaaagaatagcatgaccaatttattataaaaaaaagactagatattggagtagatatgtgatattataatacctatgttattaagcaacacaagtgccccatattatattatggggtgattttcattatagcatgactttttgaaaaagtcaatattaatttagaagaacattttaacatagggaggataaaaatgagtactaaatacgtttttgttacaggcggagttgtatcagcactaggaaaaggaataacagcagcgtctcttgggagattattgaagaatagaggggtaaaaatttctattcaaaaatttgatccatatcttaatgtggatccgggaacaatgagcccttatcagcatggagaggtttttgttacagatgatggagctgagacagatttagatttaggccattatgaaagatttatagatgaaagtttaactcaaaattcaaatgttacaactggtaagatatatagttctgttatagaaaaagaaagaaggggagaataccttggaggtacagttcaggtaattcctcatataactaatgctataaaagataaagtataccaagtagcaaaagatagagatgttgatgtggtaataactgaaattggtgggactgttggagatatagaatcacaaccatttttagaatctattagacaaataaaaagtgaagttggagctgaaaatgtttgttacatacatgttactttggtaccatacttgggaaaagcaggagaattaaagacaaagcctactcaacattcagtaaaagaattaagaatgataggtatccaaccagatataatagtatgcagaactgagaaagaattatcagatgatgttaaggctaaaattggattgttctgtaatatagacggaagatcagtaattcaaaatcttgatgcggaaaatttatatgaagttccattaatgctacattcagaaggtttagataatcttgtatgtgaaaaattacatttaggatgtaaagatattgataattccgaatggattcaaatggtacaaaagattaagaaccttaaaaacaacgtgaagatagcattagtgggtaaatacgttgagttacacgatgcatacatatcagtagttgaagcattaagtcatggtggatatgctaataatactaatgttgaaattaagtggattaatgccgaaaatattgaaaacagtaatgctcaagaattacttaaagatgttgatggaatattagtgccaggtggatttggtgatagaggaatagaaggtaaaatagcagctataaaatgggcgagagaaaataagaagcctttcctaggaatttgcttgggaatgcaatgtgccgtaattgaatatgcaagaagtgtattagggtatgaagatgcgaatagttcggaaataaacccaggcacaaattatccagtaatagatcttatgccagatcaaaaggatatagaaaatcttggtggtacaatgagattaggattatatccttgtagattagctgaaaatactaactcttatgaagtatataaaaatgaaattatcaatgaaagacatagacatagatatgaatttaataatgaattcagaaaacaaataactgaagctggaatgaaaattgcaggaacgagtcctgatgaaagattagttgagattgttgaagttgaagatcatccatggtatgttgcagtacaattccacccagagttaaaatcaagacctaacaagccacataagttgtttgtaggatttattaaagcagcattagaagaaaataaatcaaagtaatttgttttattattgagtttaatatataataagtattataatttattatatattaaacttattttaataactttagtagtttaaattattgatcgtgaattatataaaataaaatttaatatattgcattaaatttgaaataaatatctaaactaatagaaaatgtatttttacaagtattattctaaaatattctcaaatatatatcatttctaactatcttactgttaaattttccaatataaaatataactaaaattataaaagaattgattttatagattcatatctataaattggaggtgcgaacttgacaaaaaaagaatatgaaagcatgactttaacaaagttaaaagatattgctaaagatttaggtgtgaaaaatatatctaaatataaaaagaatgagttaatagaagaaatattgaaagttcctagtaactttatagaaaagaatggtgttatattaagagaaaatatagcacctaagaatgtagaagagactagaagtgttatgcctagaagtaataatactgagtcgaataaagaaagcaatgattcagaagtaaaatctagaacaaatgaaattgggaatgtggaaaagaaagaaaatttaaaagaaatgataaatgaatccaacgttgcaaatgggattttagaaatacttgaaaataatagttttggtttcctaagatgtaaaaactatttaactagtagcgaagatgtttatgtatctccatctcagattagaagattcaatttaagaacaggagatgaagttgagggtaaagtaagagaagcaaaggagactgagaagtttaaagctttattatttgttcaaaaagttaatggagagcatccggaaaaagctataggaagaaaatcctttgaaacattaacaccaatatatccaaaagaaagattaaaattagaaacctctgatagtaatgatttatcatcgagactcatggatataatatgcccaataggaaaaggacaaagaggaattatagttgctccaccaaaggcagggaaaactacgctattaaaaaagattgctcaaaatatatctaaaaattatcctgatgtaaagcttattgttttgcttatagatgaaagaccagaagaagttacagatatgaagaggtctattaatggagatgtagtttattcaacttttgatgaggaaccgcaaaaccatgcaaaggtagcccaaatggtattagaaagggctaagagaatggttgagcaaggaaaagatgttgttattcttatggatagtataactagattatcaagagcatacaatttgacaataactcctacaggtagaacattatcaggtggtcttgatccaggtgcgcttataatgcctaaaaagttttttggagcagcaagaaaaattgaagagggcggaagtttaacaatactagctactgcactaattgaaacagggtcgagaatggatgatatgatatttgaagaatttaaaggaacaggtaatatggaggttcatttagatagacgtctacaagagagaagaattttcccagctatagatatatataagtctggaacaagaaaagaagatttaattttatctaaagaagaattagaagtagcattctccataaggaaaaagatgtatagagatggaaactcagatgatattacagagaatttaattaatatgttatctaaaactggcaacaataaagaatttgtagatgtattccagaaaaaaattcaatagataacaaaaaagatgaccattttattctagtggccatcttttatttttttgaaattaaatcatctgctatatcgactattttagttaaagaataagttgatgataactctttgagctttagtttaattttagatagctcattggggttatttattaaataatttattttatcatttagcttgcttaagtcttttacatatattgaataaccttcgctagtcagaaaatctatattttcattttcttgacctggtatggcaaatggaattattaatggaatgttctttactatagattctgtaacagttaatccaccaggttttgatattaggatatcacaataatccattaaataagagatatcttttgtgaagcctaatatatgaagctttttatttttaaatttattttccttgcaataactaattaatctattttttaagttatcatttttgccacaaactactgtgattcttaacttgtgtggattttttaacaattctttaagaactgtaaaaatagtagttaacccaagacttcctcccatcagcaataaattaaaatattcatcatcttttaaatcgtttgctgatgtaacttcagtataaaatttactacttataggtatgcctattggataaattttattgggattaatgcctctatctactagagatttttttgtatagttacttccggttatataagcatcaacgtaagaatccacatatagataatgagccttaaaatctgtaactactaaaataaaaggtatatctaatccattcttttttagatctgaaatcacgctaatattaattgaatgggtagctatgatgacatctggttgtattttgtttataagtttcgaaaccttctttcttgccataaagaagatgagttttaatagtttattagttaaatttgtgtcagttagtttgtaaaagaaaccataagtttttggaaacttcgatgccgaaaactcatatccaattacaattatatcgttaagaagcttgctattcttggctaaaaaatcaagctttgtaatctcataaccagaattattaaatgattcctctaccgaagcagcagcttgattatgtccctgtcctgtagatgttgttaagattaaaacttttttcatgaaagtcactcatttcaacattattatattacatagtttaccatgtatagtatataatttaaatattaaattatatacgctaatatattaaaatttagttatttaaattttaagtatgtataagtttgcaaacaattgcagtaaaatatatatttctaatatattagaaatatgaataaaaaaggaaagacatcgtctttcctcataaagttattacttgctgccaatgttgaatctcttgttgaatttatcaactcttccaccaacgtcaacaattttttgtttaccagtgaagaatgggtggcatttagagcatatttcaacttttagttcttctttaacagaaccagtagtgaaagtgtttccacatgcacacttaaccactgtattgtggtggtattctggatgtatgccttctctcattatttttcacctctttcaattatataaactatgttaattattcaataacaaccaccatattatatcatagtacaattttagcgtcaataataaatctatgcatgtaaataatataaaaatgtctttttatgatcactattaaatgatataatcgattatgataccttaaataaggagagtattttacagatgagtaaattatattttagatatggggccatgaattctggaaaatcaactcatttaatgcaagttgcttataattatgaagaacgtggtatgaaggtggtaattattaaacctagaattgataataaaggtggagacacacttgtatctaggttaggagtaaataggcgggtagatttattagtttcagatcaggatgatatctttcaaataatcagtaattatataaaagaaaataataaaatagactgtatactagtagacgaagttcaatttttaagagagtcacaaatagatcagttgtttgaaattgctgtaaagattaatatacctataatatgttatggtctaagaactgattttaaaagaaatggatttgaaggtagtacaagattgttattgttggctcatagtattgaagaaatgaaaacaatctgtgcatgcggtaggaaagctgtgtttaatggaagaaaaataaataataaatttgtatttgagggagaacaaatcgcaattgatgatgaagataatgttgaatatgagtcattgtgtggagagtgctactataaatacaaagaaaattaattaggagagtaagtgatttttataaatggaaagacgtgatgttggagggcaagctgttatagaaggtgttatgatgagaggaagtaaaaatcttgcgactgctgttagaactcccaaaggtaatatagaaatagattttaaagataatagaccagtgacaaaaaaatatccgattttaaatataccttttcttagaggttttttcgtactagtagaatcaatgaaggttggaatggaatcattaaactactcagcatcatttttggaagaagataatgaagaaccttctaaatttgaaaaatggttagatgacaaactgggagaaaaggctaatagtgtattaatggcaataactatgtttatttcttttctttttgccataggactttttgttgcattgccaacaggcatagcatcagttttcaaaggtgcaggtatttcaaatgtaatgctgaacctggtcgaagctcttataagaatagtgattctcttgctttatatgttttctataagcaaacttaacgatatatatagagtgtttcaataccacggagctgaacataagactatattctgttatgaagctatggaagaattaactgtagagaacgtcagaaaacaatcaagattacatccaagatgtggtactaactttttgtttttggtaatgtttgttagtattatagtgttttctttcactgggtggggtggaatcatagaaaggttagctcttagaattattcttataccagtagttacagggattagttatgagataataaaatggcttggtaaaaatgacagtatgctagctcaaataatagcgtatcctggccttaagttacaactgttaacaactaaagaaccagatgattcccaaattgaagtggctattgcatcgttgaaagcagcagaaggaataaaagatccaaataaaaatattgaagagctgataaaaacaggtacatttacattaaaagaaaatggcatagatactgctaggttagatgcagagctattgttaggaaatattattgagaaagatagggtttacttaattacacataaagaagatgaagtaagtaaggaagatgctgaaaaatattttgatttgattgaaaaacgtagaaataaaatgccagtaaaatatattctaaataaatgtgaatttatgggtatcgaattttatgttgaagaaggtgttttaataccaagaggggatacagagatacttgtagatgaagttcttaaaattatagaagaaaatcaagaaatgcaaatatgcgatttgtgttctggatctggtgcagttggtatatcattagcacattttaggcaaaatataaaagttgatttaatagactattatcctattccggaaaaagtatcactaattaatatagagaaaaataagttagaagatagagttttctttataaaaagtgatttgctagaagagtcgataaaaaataataaaatatatgacattatagtatcaaatcctccgtatattgaggaatgtgaaattgggaaattaatggaggatgtaaagaattatgaaccgcacactgcattaaatggtggaaatgacggattagatttttatagaaaaataattgaccaaagccaatatacattgagagaaagtgggatattagcatttgaaataggatataatcaaggagaagcggtgaaactattaatggaaaataacggttttactaatgtgaaaattgttaaagattttgctagccttgatagggtggtagttggaattaaaatttaattgaaacagatcttttagatataagaacgaattaagaagtcataggatgtataatttataaatgaggttagttggttaagtaattaaaatatgatataatgtagaaatgtgaaaaaagaagtacggagtgatcaaatgttattagataaattagaatttatagaaaacaaatatgatgaattatcagtgaaaataagtgatccatcaattatgcagaatcagaatgaatggagaaaactatgtaaggaacatgctgacttagaagttatagttaatagctatagggaatataagaaagtagttgaagatttaaaagctaacaaagaaatgttaagcggtgaaagcgataaagagatgagagaaatgttaaatgaagaaataactgatctcacaaatagagaagaacaactagaaacagaaatacaaattttattattaccaaaagatcctaatgatgataagaacgtatttgttgaaatcagagggggtgcaggtggcgaagaagctgcactatttgcatacaatttatttagaatgtatacaagatatgctgaaactcaacgatggggcgtagaaatcatgagtttgaatgaaacagatcttggtggttttaaagaagttgtttttatgataaaaggtaatggagcttattctaaattaaaatatgaaagtggagttcatagagttcaaagagtaccagatactgaatcaagtggaaggattcatacgtcaacagctacagtagcagtgctaccagaagttgatgatgttgaaatagaagttgcagataaagatgttagaatagacgtatttagagcttcaggaaatggaggacagtgcgttaatactacagactcggctgtaagaattactcacttgcctacagggcttgtagtttcatgtcaagatgaaaagtcacaattaaaaaataaagaaaaagctatgaaagttttaaaatcaagattatatgaacaggcagaaagagaaagagcacaaggaatagcagaagacagaaagagccaagttggaactggggatagaagtgaaagaattagaacatataattatcctcaaggaagaattacagaccacagaataggactaactttatataagttagatacatttttgggtggagatattgatgaaatgataaatgcacttattacagctgaccaagctgaaaagatgaaattaatgggaaacacacaaatgtaataactataaagcaaagccttgcattttatatatgtagggctttaaaagtacattggagattgattatggatatatataaggctgtaaaaaaagagcgattacatttaaaaattttcttaattaccatggttattattgcgttttttcttccaacagttctaataataaccggattaactactattttttatattagttatgtgatttttatagaatttttaatagttatagctattataattaagatgaatgcctatattgttgaatataggtgcttaaataataggttgattttcaaggtcggtatttccattaaagaatacttaattatatgtgataaagttgtactggtacatacaaataaatctgactatgatttagaaatagttttaataacaaatgttgtttttaaaaataagggattgagacctgttgatgatgggtttttaagaagatatccacaaattattgaagattataattctataaaacaattaaattctcagaaagagtattattttcaagtaataaaaagaggtggactaaagaagtatttattattagattcaatatataggaattgcgttaaagctatttacactgatgaaagtatacaaaatataaaaatatcaagaggccagcttatagtttaatcaggaatttttttataaacaataagtttagaattaggggaagaaggtaatatgtttgaaaactaaaattagtatgatcaaaaatgttagtgaggatgaagagaaaataagagaagctgctgaatgtataaaaaatggcggtactgtagtttttcctacggagacagtttatggattgggtgcagatgcacttaatgaagaagcggtagaaaaaatatttaaggccaaaggaagaccgcaagataatccactcataattcatgtttcgtcgaagaaacttgatctatatgcaaaagaaataccaaaagtagctgatgaacttataaatagattttggccaggaccactcacaataattttgagtaagaaagatataatacctaatgtaacaagtgctaatttaaactctatcggaataagaatgcctgataatgaagtagctagaaaactaattgaattatctcagacaactatagcagcaccttctgctaatataagtgggagaccgagcccaacagattttcagagatgcatagaggatcttgatgggaaggttgattatattcttggaggagaacagagtgacataggtgttgaatctactatagtggattgcacagtagtaccacctatagttttacgaccaggtggtattacattagagatgcttagagaagttgacccaagaattgaaatagataaagctataatggaaaaaccaagcgaaaacttaaagccaaaggctcctggaatgaagtataagcattatgcaccaaatgctaaagttacaataatttctggggaaagaaaaaaaactattgaaaaaatccgtgaaatggtacactataatatagaaaaaggtaaaaaagtatgtatcctcactgttgaagaaaatgttgatgaatatacagaaggaactagtatagtattgggtagtctaagtgatttatcaacagttgctagaagtttatttgaagcattgagaaagtgtgatgacctaggagcggatttagtttttgcagaaggatatgaagaaaaaggtgtaggggtagctattatgaatagattaaataaagctgctggatttgatatcataaatgtataataattatgcatgttgaaaaatcacaaaataaattaggagatgatttaattatgaaaattgcaattggatgcgatcatggtggacttgaacttaaaaatgaaatcataaagtttttagaaagtgaaaagcatgagattaaggattttggtacatattcaacaggttcttgcgattatccggatattgcattaccagtagcagaagcggttgctgcaaaggaatatgagtttggtatattaatatgtggtacaggaataggaattggtattgcggccaataaggtaccaggaattagagcagcactatgttcagatacatttagtgcccatgcaacaagagaacacaataatgctaatatattaactatgggccaaagagttgttggagcaggtcttgctttagatatagtaaaaacatttatatcagctaaatttgaaggagataggcaccaaaaaagaatagataagatttcagatattgaaaaaaagtatacacattagaaaaaagcagctatgctgcaaccaagatcatttagattagaaaaaagcagctatgctacaacaatattaatttatattattagaaagctaaatggggtatataaatataaagggctataaatactaaaagcaaacttggaggaataataatgagcaaagttatagaaataaatcatccactaatattacataagttggcaatcttaagagatgaaaaaacaggttcaaaggattttagaaaattagtagaagaaatctcaatgttaatggcgtatgaagtcacacgagatttaaatacggaagaagtagaagtgaaaacaccagtagcagttactaaatgtaaaatgctttcaggaaagaaaatggctgtagttcctattttaagagctggtcttggaatggttgatggagtacttaatttaataccggcagctaaggttggacatattggattatatagagatgagaaaacacttcaaccagttgaatatttttgtaaaatgccacaagatattgcagaaagagatattatagtagttgatccaatgcttgctacaggtggatctgcaatagatgctttaactatgttaaaaaatagaggggcaaaaaatttaaaattaatgtgcttggttggagcaccagaaggtatagaagctattaaaaaagcacatgatgatgttgatatatacttagcatcaattgatgaaaaattaaatgaacatggatatattgttccaggtcttggtgatgctggagatagattatttggtactaagtaattagtaatttattagaattaaaagctatctacataagtttctgaatgacccaagataattttactggggggaatatagaaaatggagagacgagataagaaaaattattacttggatattgctgaaacagttttagagagaggaacttgtctaaggagaaactatggttctataattgttaaaaatgatgaaataatttctactggatacacaggagcacctagaggtagaaaaaattgcatggacttgaatagttgcataagagaaaagttgaaagttccaagaggtactcattatgagttgtgcaggagtgtacatagtgaagctaatgcaataataagcgcttctagaagagatatgattggagctacattatatttggtaggacgagatgcaaaaacaagagaatatgtaagggatgcaaactcttgctccatgtgtaagagattgataattaatgccggaatttctaatgttattataagggattcaaagcaggagtatagagaaataagtgtagattcatggatagaagacgatgactctctaagaatagtaaaagacgcagggtattaattttttagaatttgcatatttgaataaatccaacaagcattgcgagttggatttatttttaaagtataaactttaccagatagatagtatgcgtaatacgcttttttctttaatgaggagataacggctgtacggcgctggataagtttcaactaagattcagatggagactaaactacgcctgaattaagtttaacttgattttaaatatacataaagacagtacttagaaatagaatgagaaaaatctataattgcttaaatataggaggaaataatttgagtacaaagaaaattattacgatttttggaactagacctgaggctataaaaatggcacctttagtaaaggaattagaaagaagagaagagattgaatcgaaagtttgcgtgacagctcaacacagagaaatgttagatcaagttttggaattatttgatataaaacctgattttgatttaaatataatgaagacaaaacagactttaacaggaattacgagtagagttttagaagggttagaggaagtttttaaagaagaaaagccagatatgatattagttcatggagatactacaactacatttgcaggttctttagctgcattctatcagcaaattaaagttgggcatgttgaagcaggtctaaggacttttaataagtattttccttttccagaggaaatgaatagaaaacttacaggaagtctagctgatctacattttgcaccaactaaaggttcgaaggaaaacttactaagggaaggaataaatgcgagtgatatatatgttacaggaaatactgtaatcgatgctatgaaacatacagttgaagatgattacatctttgaaaacgaggagttaaataatattgattttagtaagaaagtaataatgatcactgctcatagaagagaaaactggggagaaggaatccaaaatatatgtatagcattaaacaaaatagttgaacagaatgaagacgtagaattagtgtacttagttcatttgaatcctgtagttaaagatgtagtttatgagagacttggaggaaaagaaagaattcacttgctgtcaccattagatactaaggaaacgcataatttgatgaataaatcgtttatggttatgacagattcagggggattgcaagaggaagcaccacatttagcaaagcctgtacttgtgttgagagacgttactgaaagaccagaagctgtagaggcaggcaccgttaagttggttggaactaatatagatcaaatagtatcagaggcaaacgagttacttagaaaccctgatgcttattgtaaaatgagtaaatctataaatccttatggagatggaattgcatctagaagaatagcagatgctatattaaaatattttggtttgacaacaagagaagtagaagaatttaaaagataaagtttgtttaaattttaacaatttatgcttgataaaagaaataataaaaggtataatttagttatgttaataatttaacaaaagttaataaaataatctataaaattttaggaggtcaaacatgagagaggtagttattgtaagtgcagtaagaacagcattaggtagttttggtggagcattaaaagatgtctcagcagtagatttaggagctttagtaattaaagaagccgtaaatagagctggagtaaaacctgaattaattgaagaagttattatgggtaatgtaattcaagctggtcttggtcaaaataccgcaagacaatcaacaataaaagctggattaccacaagaagtttcagctatgactattaataaggtttgtggatcaggtcttagagcagttagtttagcagcacaaatgattaaagcaggagatgctgatgttgttgttgctggaggtatggaaaatatgtcagctgccccatatgcattggacaaagcaagatggggacaaagaatgggcgatggtaaattagttgatacaatgataaaagacgcattatgggatgcttttaacaactaccatatgggagttacagctgaaaatattgctaaacaatggggattaactagagaagagcaagatgctttctcagctgcatctcaacaaaaagctgaagcagcaattaaatctggaagatttaaagatgaaatagttccagttgttattccacaaagaaagggagaaccaaaagtatttgatacagatgaattcccaagattcggaacaacagcagaaactttagctaaattaaagccagcatttattaaagatggtactgttacagcaggtaatgcatcaggtattaatgatggagcagcagcttttgttgttatgagtgcagaaaaagcagaagaattaggacttaagccaatggctaaaatactttcttatggttcaaaaggattagatccagctatcatgggatatggaccattccatgcaactaagaaagctttagaaaaagctaacttaacagtagaagatttagatttaatcgaagctaatgaagcttttgctgctcaaagcttagcagttgctaaagatttaaaattcgatatgtcaaaagttaatgtaaatggtggagcaattgctttaggtcatccagttggagcatcaggtgcaagaatattagtaactcttcttcatgaaatggaaaagagagatgctaaaaaaggattagctacactttgtataggtggcggaatgggaacagcacttatcgttgaaagaatttaatataaattaagatttaaaaaggttactatgataattctcatggtaacctttttttattaaataagagtataaaataaagttaaaagaagaaaatagaaatgcatgtattaaattatatagagccagtggaaaatgaaattattatgtatattcattatctgatgcaaggggtaaaaatattatcaaaataattactatatataaaccggtggaaaaaatgaaagaatttttaatcatatatttcattaaggtgttttacatacttcataacatagttaatgcgaggatttgctaaaaaataatacatataaatttggtaattgtagattgaaaaaaaataaatattgaataaggattaatttctatattcaataatatgaaatacataatagtaagtatagctttataaaacttaaaaatagtataaatttcaccaaatttttgaaaattgatgacaaaatttgtaatgaaaatgttaacaaaaataatattttgtagataaatgttacagaatattcagaaaagtgaattgaacaagttttaaaaaatcattaaatgagaaaaatgaagaaataaccaatattagctgagcatttaagagtatatgcagtataaattcattataaagtaaaaataagctgattttactttcaaatagtgttttattaaagataaatataaagatataattactgatattgaggttaagggggttatgtatgaataaagaagtgaataaactgcttctacaaacgataaaatatgatttggggagcggattattgatatctttagtaatagtcttaatttccacctttataaatgcaggaatctatatgataggtatgtgtgtttctttaataaattttctagctagtggctatattgttggaaagtttttggataaaaatagagcgtggattataattcctacgtattttattaggatggcatttataattgctacagtatttccgtttttaggaaatataaaatacgtaatatattatatgataggctttgtttcacattatgtactacttatagtttttcgtattaaagaaaataggaaaggaagtgtttagagtggagcccgtgatacctatattttcacctgaaatttttggcgttacagtagatattactgcagggataataattgaatggattgttatcgcaattttagggataggtgcttttctattaacaaaaaacttgaagttaaaacctggcaagacccaagcggctttggaaaaagtctatcaaacaataagggactttatggttggtactatgggtgaagaatatgaatcatttctgccttatataggaacattaatgatctatttgctaatactaaatctagttggattattaggatttaagccacctacaagtgatttgagtataacagcatccttcgcaataaccacatttttagtagtgaatttaaatgctattagaaagaatggaatacttgggtttggaaagggattgttacatccatttatccctatgctgccattaaacataatagaaagaattattttgccaatgtctttggcgctaagactttttggtaacatgattgcggcagtaatattattagaattggtgtatcgtggattgagttcaatatcaatttttgcacagtttggtataccggtaatattacacgcatatttcgatttatttgatggattaattcaaatgatagtatttacaatgctaactatgattaatatcaaacaaatagcagaagaataagtttaaaaattattaaaaaattaaaattaattaatatcttaggaggaatcataatgagtttaggagttctagcagctggtatagctgtattatcaggtattggagcaggagtaggtattggaattgcagctggtaaggcagttgaagcagtaggaagacaaccagaagcatcaggaagagtaatgacatttttcatattaggtgcagcactttgtgaaactacagcaatatatggattagtaatggcatttatgttaatgggcagataataaattcgcatgagttaattacattgactccgaagggaggatataagtaaaaatggaagtaaatgtatcaacagttatattcaattggattaattttggtctgataatcttgattttaaaacatttcttttgggataaaatcaaaggaataattgaagaaagacaaaatctcgttaatcaaacgataagtaaagcagatgaagatgctgaaaaagctagaatgtatttggtaaaaaatgaacaaattttacaatcagctaaagaagaaggtaagaaaatcactgaagctcaaagagcaaagggtgataaactttacgaggaaattgttcaaaatgcaaaagttgaagcaaattcagtaaaagaaagagctaacttagaaattgaaagagaaaaagaaaaagcagaatatgagattaaaaaacaagcagtagatttagcggtagagctttcagttaaagcattagagcagcaggtagatgaagcaacacatagaaaacttattggcgattttattgctaaggtaggtatgtaagtatgcaggagtatttagagaaaagatatgcgttagctctgtatgaaattgctgaaaagaacaataaagtggatgaatatttacgagacttaacagatatatgtgatatatttgatgaaaataaagagttttatgaagtaattaatcatcctaaaataaacacagcaaaaaagaaacagttatttactgatttgtttaaaggaaaaattgatgaagaattactttctttcatgatgatattgattgaaaaggatagaattcttcagttaagagaaatactagatcaaatggaaaagattgatctagaaagaagaaatactataagaggtatagttaaaacagttgtaccacttttagatgaagagttagaacaattaaaagctatctttgagaaaaagtacgaaaaaaatattttatttgatactaaaatagacaaaagtctcttaggcggagtttatgttaaagttggaaatgatattattgatggaactataaaatcaaaggtagaagaaatgaaagaattaatgcttaagaaagaatagaggtgaatccatgaatattaaaccagaagaaataacttctattataaagaaggaaatagagaaatacgaaaaagatatcaaaacagtagattctggtactataatccaaattggagatggtgtttcaagagtttatggattagataattgtatgcaaggggaattattagaatttcctaacaatgtatatgggatggttttaaatcttgaacaggataatgttggttgtgttcttttaggagaagaaaaaggaataaaagaaggcgatacagttaaaggaacaggaagagttgttgaagttcctgtaggcgaagcaatgattggaagagttgttaatgcattaggagaaccaattgatggtaagggacctataagcacaagccaaactagagcaatcgaaattccagcagcaggtataattgatagaagttctgttaatgagccattacaaactggaattaaagctatagattcaatgattccaataggtagaggacaaagagaacttatcattggagacagacaaacaggtaaaacagctatagctatagatacaatattaaaccaaaagggtaaagatgttatatgtatatatgttgctatcggtcaaaagcaatctacagttgctcatatatttaatacattaactgaaatgggggctatggattatagtatagttgtaagtgctacagcttcagaatcagctccacttcaatatatggctccatattctggatgtactataggagaatattttatgcatcaaggtaaagatgtattaataatatatgatgatctttcaaaacatgcaactgcatatagagcaatgtcattattacttaagagaccaccaggaagagaagcttacccaggagatgttttctatatacattcaagattacttgaaagagctgcgaagctatctaaagaattaggtggtggatcaattacagcacttccaattatagaaactcaagccggagatgttactgcgtacataccaactaatgttatatcaatcactgatggtcaaatattcttagaatctgatttatttaatgcaggacaaagaccagcagtaaatgcaggtatatcagtatcaagagttggtggtagtgcacaaattaaagctatgaaacaggtaagtggtactttaagattggaactagcacaatatagagagctagaagccttttcacaatttggatctgacttagatgccgattctagtagaagacttgaaaaaggtaagagattagttgaagtattaaaacaagatcaatatagtccacttgaagttggaaagcaaatcataatattatatgcagctgttaatgatttcttatcggacattaaagttagcgatataaagagattcgaaaaagaattcttagagtatgttgatactcatcatagagaaattgaaaaatcaattattacaggaaaaactttaactgatgaaataaaatctatgttagaggaagcaatagttgagtttaaaaagatatttttacaagaagcatagcttaaattcttaagctatgcccttcttaggaggtggagataatgggcgcagctggacttcttgaaattaaaaagagaattaaatcagttgaaaatacaagaaaaatcactaatgcaatgggacttgttgccacttctaagttaagaaaaactaaaaatgagttagcagtaaacaataagtttattgatataactgaacctgtcgtaagaaatcttgcaactacagctggtgaagaaggaagcaatgtttattttgaagggaatgatagtcaaaataaactatatgtagtaataacatcagattcaggattgtgcggtgggtttaacagtagtgtagtatctcaattagtaagtcaaattaaagataaaaaggatactgcaaagattgttttagttggaagcaaaggtcttggttatttaaagagaattaagatagaaccagtaggagaatatgttggtattgaagatgtgccaacagtaagcgaagcaaaagaaatatttgataaagctcttgaaatgtatttaaatggtgatgtatcagaggttaatattgtatactctgactttatatcatcagttaaacaagaaacaaagtcagttaagattttgcctataagtaaatctgaaggcacaacaggatcatttcttattgagccggatttagatatagtattagaagatgctcttaatatttatctaaaaggaaaaatcagaagcattttattaagttcgaaatgtagtgaacaaagtacaagaatgacagctatggacggagcaacaaagaatgcagatgatctattagacaaattaaagcttaaatttaatagaattaggcaaggtgcgattacgcaagaaatatctgaaattgttggaggagcagcagctcaaaattagtaaggaggtatcttatgcctggaaagatgggaaaagtagttcaagtaattggaccggtaatagatataaagtttgattcagattctctcccagatttatataatgccattgttattaaggcgggagattatgaattagtagcagaagttgaacaacacgttggagatgatatagttagaacaatagctatgtcagctacagaaggattaaagaggggaatggatgctgttgatacaggagcacctatttctgttccagtaggagaagaagtattaggaagattatttaatgttttaggaaagcctattgataagtgcggggatattgaagtaaaacaagaatatccgattcatagaccagcaccaagctttaaagatcaatcagttgagcctgaaatgtttgaaacaggaatcaaggtagtagacttacttgcaccatatcaaagaggtggtaagataggtctatttggaggagctggagttggtaaaacagttttaatccaagaattaataaacaacatagctaaacaacatggtggtttatcagtatttactggagttggtgaaagatcaagagaaggtaatgacttatatcatgaaatgagagagtcaggagttattgataagacagcattagtatttggacaaatgaatgagccaccgggtgccagaatgagagttgcattaacaggtcttactatggcagagtattttagagataaaggtcaagatgtgttactattcatagataacatattcagatatactcaagcaggttcagaggtttcagcattacttggaagaacaccttcagcggttggatatcagccaacacttgcaactgaaatgggtgcacttcaggaaagaattacatcaacagttaatggttctattacgtcagttcaagctgtatatgttccagccgatgacttaacagacccagctccagcaacaacatttgcacatttagatgcaacaacagttttatctagaggtattgcggaacttggtatatatccagctgttgatccattagaatcaacttcaagaatccttgatccaagaattgttggagaagagcactataaagtagcagctgatgttaaacacgttcttgaaaaatataagcaattacaagatatcatcgctatcttaggtgttgacgaattaggagatgaagataaggctgtcgtggctagagcaagaagaattcaaagattcttatctcaaccatttacagttggtgaacaatttacaggattaaaaggtaagtatgttccagtaaaagaaacagtaagaggatttaaagaaattcttgaaggtaaatacgatgaattgccagaatcagctttcttatttgcaggaactatagatgatgttatagaaaaagcaaaaaaattaggataaaggggatgagcaattatggctaatacctttttactaaaaattataacacctggtcgtgaagtgtataatgatcaagtagaaaaagtaactttaaaaagtgcagatggagaatttcaagtacttgcaaatcatcaaagtctaatatctactactataccttgcatcgcgaaattcaaagatgctaagggaaatgatgaagagttatttatttctaagtcacttgttcagattaataataacgaaatggttataagtagtgatgctgctgagtttgaagaggatattgatgaagaaagagcagaacgagcttttagaagagcagaagatagattaaaaaactccgaaaactacaatagaggaagagcagaggcagcattctttagggcaaagcaaagattagctctaaaaaaatctaatagataatgttactataaattaaagtgtaccatcttttatataggaaatatccgtataaagatgctacactttattttttattattttttattctagatattgacaatctatcacaaaattttaagaaatttatattatatattatatagcttgatagaaaagagaataaaagttaaaggagatggccataattaagaagataaattaagggggtcttaatatgaatataaaaatgagtatagtaatttttatattattatctttttttaatataggtgctatttccagcgatatagtcagcgctcaaaattcattcaatactttagaaatgaaagtgaaagatataagtgagtttcaagaaaatggtgtaaaacttcagtataggacgaaaaataatattgcaaatgaagcttatagaataaaagaaaatttacctagaaatatggctctttcttataaagatggtggaaatgatgagtttgaagcgtttaatagtgattttaatattgatataaaaatatggcgtgaagatgtatatagttatgttgaaattatattaacaaacaagaatcctaaatatgggacaaagtatttgaaaaacatacttaagaatattgaaaattcaaaattagaaaatatgcaatattttctttactatgaaggtaaagaaaaaggattagatagtgattattttacaaatggattagtcagtgaatataacataaggaaggcacaacttatgaaaatcagtaatggatactcaggaacaggttatttgaacgatggagaaaaaattaattttgcattagttgattatgatactggttcacatataataattggtacgccaataatatttacaacatattaagacatattgaaaaagcttttcaatataacctttattttgctttgggtagagtatagatttgcttattagcaaagccttattggatttatttaaagtagagtatatgtaatattttggacagttatttttcatatgcttaacaattcattatggaggataatatggagaaaatagtggttaaaggtgtaaaagaactgagaggggaagttaatataagttgtgcaaaaaattcaattttaccaataattgcggcaactatattgtgcccagagcctataattattgataatgcacctaggttagaagatgttgaggttatttgtaagttattaagcgaactaaactgtgacgttaatatttcaaacgtaaacgatagattaacaataaatacgaaaaatatagtagaaatggatgctaatgaagagcttatgaggaaaatgagagcatcatttttaattatgggacctatgcttgctagatttggatattgtaaattatcattaccaggcggatgtaacataggaagtagaccaattgatttgcatcttaaaggatttaaattacttggagcagaggttgtaataggtcatgggtttgtagaggtgagagcaaagaaaatagtgggcaacagaatttaccttgattttccatctgttggcgctactgaaaatattatgatggtatctgtctttgctgaaggaacaactataatagagaatgcagcagaagaaccagagatctgggatttagcgcaattcttaaataagatgggggctaaaatagaaggagcaggatttggaaagataactataactggtgttaaaaatctaaaaggaattagttatacacctatatatgatagaatagaagcagggacatttatgatagcagcagctattacaaatagtaaaataaagataaatggagtgaatgaagagcatttaagacctgtaatagaaaagttaagagaatgtggaataggttttagcaattacaaagatcattccattgtagtagatggacggggaagtaagaggccattggatatcaaaacacttccttatccaggatttccaaccgatatgcaagctcaaatgatgagtttattatctattgttgaaggtgttagtgttattacagaaacagttttcgaaaatagatttatgcatgttgctgaattgcaaaggatgggagccaacatcaagattgatggaagaactgctataattgaaggcaagccaagactcacaggctgcgaagttaaagcaactgatttaagggctggggcagcaatgatactaagtggattagtagcagatggtgaaacagtggtaaatgatgtttatcatattgatagaggatatgtaagaattgaagaaaagtttaggaatttaggagcagaaatatatagaataaatatgtagattaagatatgaattgtgtgtatgcataattagggttcatagttatgaacaaggtatacaaatttttcatgtaagttttataaaggaatttacatgaaatttaattacctatccctaattatgcttttttattctttgggaatttatatttcagtaaaatctgtggacgaggtactccttgaggggataaattaaaaaaggttgattaaatagtttgggtattttaaaaagaataaaaaaagaaatcttattcgcctgacttttctcacatgcgttcgaaaagctagatgcgtgaaaaaaatctacacatatgaaaagagtgcgaagcacaatacggaacttaaatgaaaagagtgcgaagcacaatacggagcttaaccacagtcgcctgggatttttttatctctaatagcttatatttaagttaaatctatgcgtaagttataggagagaccaattaagaaagttatggtttatctaaatttgggtagcttaaagttaacataattaacataattattaggctaagacaatatactttagagtgcaggctttaggaggtagagtatgaagataattaatgctaggactacaagtataaagattagcaataatgtgaaaataattgcagctatgactttgatcatttttactatattaatagcattaccaatagctttcttagaaaatggtaaagggaaaattgattcgtttaacttgagtgacaaagatataatgaagagttcaaaaataacatttccgtctaatggtaaagttaagctatatcataggtcagaagatagagttgaggaaatagatttggaagagtatgtaatgggagtagttgcgagtgaagtaccagctaattttgaggaggaagctttgaaagctcaagctgttgcagcaagaacattttatatgagtaaaagaaataaccctaataaagaggaaaaagagaaaggagctgaaatttgtgatacaacccactgccaagtatatatgagtaaggatgagagaatctctaaatggagtaaaagtgaagctgaaagtaattgggagaagatacaaaaggcagttctagatacaaaagggcaggttcttacttatgacggttcagtgttggaatatcctcaattttttgcaaccagctctggaaaaacagaagatgcaaaagatgtattttctatggatgtaccatatttaaaatcagaagacagtaagggtgaagaaattgcacctaaatataagacgagcacacaaattcctataaacgattttataaataaaattaattctaaatataaaggtgttaatgctaataaaagtaatttgtcatcactaattaagatattaagttttacagaagctggaagtgtaaaagaaataaaaataggcaatgagattgttaaaggaactgaatttaggacattgttcaatttgaattcgaccaatttcacattagactttcaacaagattctgtagaagttaactgtaagggttatggccacggtgtagggatgagccaatggggggctaatgcgatggcaaagagtggatcgaagtatgatgaaattcttaaacattactatagcggagtcgaaatccaagaaataaattacaactaaggagagagtatttacgttaacttagacatagggttggcataacttcatatgaataattgaataaatttaaagaggatacttgtttatttttttatagcaagtatccttttctatttttgactataaattagcatggggtatatcctccaattaattgaatttttgtatatgtatgtttaaaaaaagtggagatggacataatttagaacatcactacttaaaacagaaattataaagtagaacttcttaaattagggcctaaatccctgatggatatatctattgtttaataattaaattatatgtactttttaacactagatatacacttataaaaataattttaaaatacctttaaatgtaaataatacatgataaaaagcaaatttatgtattatttttcataaaaagggaactataacaattggaggtgttcatattggacaaaaatttaaaagaaaaacttaaaaacttatttaggaaggagggattttatatcgccttattcctatgtctctgtattgtagtaactgttggaactatctcttataaaatgctcaacagcaaaaaccaagttaataaaacagaagacgtaaataaagatctaacaatgaattctggaaatgaaggaaattctaataattcagttcaaaatgctgaaagagtagagaatgctcaaaataatagtaataaagacaatgcagataaaacaaaaacagaaaaggctgcatcagtatctacaaataatacggtaacatttgtaaatcctatagatggagtagaaagtagaaaatatacttatcctgcgccagttaagatggaagaaggagttttcagaactattagaggtattaatctacaatcaacagtaggatcagaagtaaaggcagcagcagatggtgttgtggaagttgcagaaaatactggtgttgaagaaggggttgtagtagaaattaaacatgctaatggcctaaagacaagatacggaaatcttgatgcaaacttatcagtaaaaaaaggagataaggttaaagcaaatcaagttattgcaaaagtaggagatagcgcaaaggtatttagtaaagatgtgtttggtgaatttttaaatttacaagtaattaatgctaatggagaacaagttaatccagaaaaatattttaatttaaaatctaaataaaattttatgaaaatatatattagtcatttgtttttttcattaaaataaatgactaataaatcaaaaaataaatgataataaaatgataaaatcaaggaagtggtattttgaaagactatattgaagaaagagttttagatgttgcaagatatatcatagattcaaaagctacaataagaaaaacagctaaggtttttggtgttagcaagagcacaattcataaagatatgacagagagattgttaaaaattaacccagaaattgctcaagaaactcattctattttagaattaaataaagctgaacgacatattagaggtggaaaagctacacaaatgaagtataaaattattgaatcttagtaggattaagtctataatatattattagtagaattatgtaagtataggtattaatatgtattataggagtgaataaaaaatgtgcttttggagaacggggatagacctcgcaattgacttaggaacggcaactgtactagtttacgtaaaaggtaaaggggtaatattaaaagaaccttctgttgtagccataaataaaaataataataaattgttggctataggggaagaagcaagaaaaatgataggaagaaccccaggaaatattgttgcagtaaggccattaagagatggagtgatttctgattacgatataacacaaaaaatgctaaaggaatttataaaaaaagcgtgcgggaaaagaagtataagtgcacctaaagtaattgtttgtgtaccatctcaagctacagaagtagaaaagagagctgttattgatgcagctatgaattcaggagcaaaaacggtccatttaattgaggagccgctagcagcagccattggagcaggattagatattactaagccgaatggatgtatggtagtggatattggcggaggtacttgtgatatcgctgttatctcattaggtggagtggtagaaagagagtcaataaaagtagcgggagacaagttcgatgaagccataataaaatatgtacgtaatgaatataaattaatgataggtgagaaaacagctgaagatttaaaaataaatattggatcagcatttaaaaactctagaaatctaacttgtatgatgaaaggtagaaacctcattacaggattaccagatgaaatagaaattacaacagaagaaatacgaaatgcaataaaggaacctgtggaaataatagttgatactgtaaaaaaggtattagaaagaacaccgcctgaattagcctcggatataatagaaagaggaatattaatgactggtgggggagctttaatacatgggttagataaacttatagagtttaagactggcgtagtagcaactatagccgaaaactcagttgaatgtgttgcgaacggtacaggcaaagtgcttaattatatagataaattagatagtcaagttaattctcagcaaatagttcttatagaatagctttataaatagcagtcattagtaattttactattgactgctgtttatttagttaaatataaaatacctaaattttaggatatttcccgtgacttaaactataggcatcaataaatattttggatataattttagccatatccataatgaatgagagtcttatgcttcgcgaaaaaaagaattcagcattatcactagagtccacaatgcctataactgatgcaattcctacctcgggaagttcttttccgactcctttaccaggatgtattgcatagtcccttatacgaatttcaccaatatcatcttcgtcacctaagcaggcatcaacaccaattattgatgcattagggtgattactatatatttcatttaagcgttcatctatgttcaaagcatgaattggagaagataaagttccataaacaggtaaagggaaaaagttttctgtgagtatagatccaactagaggacctaagcaatccccaatacatttgtcagtaccaatacaaactattatggtgtcttttgatataaattttttaacttctaaagctaaattataataaaatttaggatcaagtttaatatctggcttgctcaagggacatatacctcctttataaaatatatatatgagtaattaacagaagatagtataaaaaaatgttttttggaaattaatagtaaataaggaggtgcatatgaaaaaagttttaatgtatttggttttagttcctacaataataataaacatgtattttctgttatattggcaaccgcaagatgaaaattctgcaaaagaagttgttgtacaagaaactgtttcgtattcgaagccattatataaaataaataaagaaaaagcgttaagtcaattatctacagataataaaaaggaacttgaaaaaataataaaaaaattatctgcatttgatataggtaaaataaaagaatattatgaagatacgaatgataatgaaagcctaatagaaatatttaaaatcttaaaaaggagattaacaacagaagattataagaaaattcaagaaatatcatcttcttttttagatatacaagagattaacaaaagaataaaaaataattaggattaacatattaaatgagagcatgttgtagaaatagagagtaatatgaatttaaattatctatatgggtgtatattggagttgaaataaaatcgctttaccgatatactaatcattgttgaccggcaaatgaggcaacaaggtataaaaaataaatacggaggaattcccgagtggccaaagggggcagactgtaaatctgttacgtttcgtttcgatggttcgaatccatcttcctccaccaatttataatgggcgcatagctcagctgggagagcacctgccttacaagcagggggtcacaggttcgagccctgttgtgcccaccattataaaattactaatctaatatatatgctggcatggctcaacggtagagcagctgacttgtaatcagcaggttgtaggttcgattcctattgccagctccaataaaataatatggaggaattcccgagtggccaaagggggcagactgtaaatctgttacgtttcgtttcgatggttcgaatccatcttcctccaccaatttataatgggcgcatagctcagctgggagagcacctgccttacaagcagggggtcacaggttcgagccctgttgtgcccaccattataaaattactaaatctaataattatatgctggcatggctcaacggtagagcagctgacttgtaatcagcaggttgtaggttcgattcctattgccagctccaataaaataatatggaggaattcccgagtggccaaagggggcagactgtaaatctgttacgtttcgtttcgatggttcgaatccatcttcctccaccaaaaagaataaacttaagtttattcttttttattttttatcttatataaaaattgattgataatattgactaattatacagcatatgataaaatacttttgaaaattgaattatgttactcttatcaagagaggtggagggaaagggccctgtgaaacccggcaacctgtattatataaggtgccaattcctgtagagttttctacaagataagaaaatgattgctaaattgcgctcttcttatcgaagagcttttttatttttttaagtttgcgcatgcttaaattataaaagaaacaattaataaaatagtttgactattatttattgtatttaaataaggtaaagtttttataaacgattattattctataaagctatgtatagtttttaataaaataattttattcgtgaagataattataatatttaaatctaaggagagaaaagatatgagaagattatttacttcagaatcagttacagaaggacatcctgataaaatgtgtgaccaaatttcagatgctatactagacgctattctatctaaagatccaatggctagagttgcttgtgaaacttgcacaacaacaggtatggttatggtaatgggagagataacaacaaattgttatgttgacattcctaaggtagttagagaaacagtaagagaaattggatatgatagagcaaaatttggatttgactgtgatacatgttcagttcttacatcgatagatgaacaatctgcagatatagctatgggagtagatgaagcatttgagtcaaaaaaaggtgaaaaagatgaagttgaagcagttggtgctggagaccaaggaatgatgttcggttttgcaactaatgaaactgaagattttatgccgcttccagtatatatggctcataaattatcaagaagacttacagaggtaagaaagaatggtacattaagttacttaagaccagatggtaaaactcaagtaacagttgaatatgaagataatgtgccaaagagaattgatactatagttatatcaacacaacatgatgagaaggttactttagagcaaattcaggaagaccttaagaagtttgttatagaggctgttgtgccagcagaattattggacagtgagacaagatatttcataaatccaactggaagattcgttgttggaggacctcaaggggattcaggattaacaggtagaaagataatagttgatacttatggtggatatggcagacatggcggcggagctttctcaggtaaagatccaactaaagttgatagatcagctgcatatgctgcaagatgggttgctaagaatttagttgcagctggtgctgcagataagctagaaattcaattagcatatgcaattggtgttgcaaagccagtttcaattgaagttgaaacatttggaacaggaaaagtagatgaagataagattgttgaagtagtagagaaggtatttgatttaagaccaggagctataatcagagatcttgacttaagaagacctatctataagcaaactgctgcatatggacattttggaagaaatgatcttaacttaccatgggaacaactaaataaagtagatgaaataagaaaaaatctatagtataattcttaagtgaatttttattatcaatatatataatagaagtttttgtagaatggtaaaaagtcgtcttaaatctagacggctttttattatggagaaatttataattatatatttgaatagtatatatagaaatttaatagattgagtgctcaaataagattaaaatttataactttaattgcaaaacagataagcatttaaaagcacttaaaatctgagcactttagaatttattaaatatttatagttttattttgtatactccatttaaaagttattttatgtagggaagaataagaaaagattatgagttataagtgattagttttaaattggtataaatatttatgatataattataagaaaaaatcaaagttaaatttgacgctaaattttaattttagaaagtttaaggtaaatatataaagatttggagagattctatatggaagttctaaatggatttgttgagaatattgtttttaaaagtgaagatactggttatgtcgtttgtagaattagaaacgaaaagacattaattagtgctgtaggaacagttcctttcttgagagaaggacaaaatgtaaagttaacaggatactggacagtacacaaacaatttggtaatcaatttaatattcaggattatgaagaacttcttccaaattcattagatggcatagaaaaatatttaagtgcaggaataatacatggaattggaccagttacggctaagaaaataatagagagatttggtgaagaaactctagacataatggaaaaccatattgagaggcttatggagatagagggtataggggaaaagaaatttcaaataatatatgaatcctatatagagcaacaaggtttaaaagatataatcttatattttcataaacacggagtcactaataatcagtgtgtaaaaatatataagaaatttggtgcaaatgcgaggcagatagtatctgataatccatatatattatgcgatgaaatatcgggaattgggtttaaaacagctgacagaattgctatgagcattggcattgaaaagaattcagagtttagaattcaaagtggcattaaatatgttatgaatcaattttgctctgcaggaaacacatttatgcctaaaaataatataatagaagaatgcgaaaataatttgttaatatctaaggaattaattgaaaaaaatatatatgacatggctgcgcaacaaaaaattattgttgaaaacataaacggtactgaagtcggatttttgcttcaatattattattgcgagctaggtgttactagtaaaataataactttaggtttgcagcaaattcagactataaactcggatattgatttcgaaattaacgtttttgaaaaggaacaaaatataaaatttgcagaatcacaaagagaagcaattattggcgcatttaataatggtatagaaataattaccggtgggccaggaacagggaagactacaattataaaggcaataatacatatatatgagaataatggaatgaaagtaatacttggggcaccaacaggaagagctgcaaagaggatgactgaatcaacagggagagaagctaaaacaatacatagactattagaaatgggaatttctgaggatgatgaatcagtatttgaaaaaggagaatcatcgcctctagattgtgatgtaataataattgatgaggcgtctatgattgacattatcttaatgcagaatctactaaaagcaattaatttaggaactaggttgataattgtgggagatgttgatcaattaccttctgttggaccaggaaatgtgctaaaagatcttatagaaagcgattatataaaggtggtaagattaaaagagatatttaggcaaggatcagaaagtttaattgtagtaaatgctcatagaataaatgagggacagatgcctttgctaaatcaaaaagatagagattttttctttattagcgaagataatcaagaaagaattgcaaatactataatggatctaataaatagaagactccctaagtttaataagtcttggaataaactgaaggatatgcaggttttaactcctatgagaaaaggtgtgcttggagtcacaaatttaaatacgaagcttcaagaaatgtttaatgcatcatcaaaagataaaaaggaaaagacttctcgagatataattttcagagaaggtgataaggtaatgcaaacaaaaaacaattatacattaaagtggattagggttagtggttatggcgaaaatgaaggagtgggagtttttaatggtgatctgggattcatagaaagcatcgatgaagaaagaaaaacactcacaatcatatttgatgaagaaagaaaagttatatatgattttaattttttagatgagttggatttggcttatgctactacaatacataaaagccaaggaagtgaatttaaggttgtaataattccggtatttatgggatcgccatttcttatgaatcgtaatttgctttatacaggtattacgagggcaaaacaattagtagtagttgttgggtttcaaaaagcattaatgtatatgattaataatacaaatagtatagaaagatactcatctttgagatatagaataagagagataataaccaaagatgaattcgaagaataagggaaaggagataggtgtatgaggaatttatgtaaagtaactttagaagatttaaagtatgcatttgataagatagattattggtataagaaaaatatcaaatttttaacagtaataacagttccatttaatacatcgtgtgttttttcaaagataataagtaaagtttcacaaaataatggaaatgtcttatatgtatggggaaaagaaggtgaaaacaaagaattagtaaatataacaagagaaatgtattctgatataactcattcgtatgttgtaaaagaaatttcaaatgctaaacttacttttacgcactacaataacttaatgaagattaagcagaactatgatttggttatttttgatgatataacatacttctccaatctaagtaatgtaaatataagagagatgttagaaatgtgttcaaacataggagaaagagttttgctatatagcatagaaaagacgactttagtaggcgaaaagttcgaacttgcagcatataattataaaaaaccgtttgtggagcctagggtattaactacacgaatagatttgaattcagatattccattttctctatatgactatcttaaatggttcagggaaaatagccataaggtggctatttatgtacccaataaagagaagcttgacatggtatatgattatttttgtaataaactaaaactttcaaatgtaaaagtaataaaagtttcaggaaatgatgatataaaaaagagtgaaaaagtatcaaaatacaaggataaggcaatatttataataactaataaaatagaggagttacttgaatattgctatatggatgatgcagtagtactttttgctgataatgaaagatatacttataaaaagcttttgtatatatgtggccaaataagaaatgtaaatctaaaattaccagaggttcttttggtatcaaacgatatatcagaagatattgagaaggcaaagaatatggcaagagatttcaataaaaaggtatgggaaaagcgtttaatagaattataaaaagtatattggaaggattaattgaagtaatatatccaagagaaaattattgcattatatgtaaagaagataactgctttggtatatgcgagcattgtatgaaaagtataaaaacaatagcagattcgtatcaagatgaaataataagttatgggtattatggaggagtattaaaagatttaatacttaaatttaaatataaaagcaattttacagcaggagatatattagcagaatttttagaagaatatattataagaaacttgaaatatcaggagtatgtaataacctatataccactatcaaaaaaatctaaaaagattaggggatttaatcagtgtgagtatatagcaaagaaaatagctaatgatttatcaattgaagctctagaagttttgataaaggataaagaaacaaaagaacagaaaaaattaaagaaggatgaaagatatgaaaatataaaagatgctttcaaaataaaaaaaggattagaaattggaaaatataatattatactggtagatgatgtaacaactacaggtgcaactcttaaagaagcttataaattattaagaaaatatcaagtaaaagacataaaactcttgaccttagctaaaagtcatatataatattaatgtaaagctaggtttgtggttgaaagtcgaagctagtcgcaggcaaaacgatccacgtaatttagacaaaatgtctaaggagcatggtgcggtatagaagtaagtcctgccagattgtattctgagagggttagtagtgagggattaaattctattagcaaaagctccagcaggcgagtgtggggtcaaaaaccaggtcaactagctttacctctatttattttaaaattatcattaataggaaatgtgaggaatctaatctaaagtttgggattagatttattttttgtctttagttttcagaatttactgataattctcttgttaagttaataaaaaagtgataaaatattaataacttaaagatattaagtttaaaaactttttcatatgagaggggctggaatttatgaaagtcacagttatagcaaaaaatatggaactaacagatgcgctaaaagaaatagtgcaaaaaaagataagcaaattggaaaagtattttgaagtgaatgtagaagctaaggcgacactaagtgttcaaaaaaatagacataaaatagaagttatgattccttttaatggagtagtattaagaggcgaagaatcaacttccgatatgtataaatctcttgacttagtggaagataaattagaaagacaaattagaaaacaaaaaactagattatctagaaaacatagtgggtcattgagatttggagaaataaataatatagatattaagccatcagaagaggacgatggtaaattggttaaggtaaagaaatttggggtaaaaccaatgaattctgaagaggcaattcttcaaatggatttattaggacataatttctttgtatatcaggatgcagatagtagtaaagtaaatgtaatttataagagaaaagatggggattatggtttgttagaaccagaattcatataacatataagagattttaataatggctgtccaatgtgcttatttaatttgcatcattggacagttatttttcatatcaaatgattgaacagataatgacaatatttttacataaaattttcaattaatattaataatttgtgattaaaatattaaaaaaaagttaaaattgggtgctttatataggatttaatacaaaaatcatgagttttattgaaaataagataagtaaaatgttataattataaaatacgtgatttataaaataaattacagattatgaattatggatagttaaaatatattggaaattaacgtgaaatatataatttcgaaaggatgacattatgggactattaaatgccgtatttggaacatatagtgaaagagaagttaaaaggctcaaacctactatacaaaaaataaatgatctagatgaagagctgcaaaagctttctgatgaggagttaaaggcaaaaactccagcatttaaagaaagattagcaaatggtgaaacattagatgatattttaccagaagcattcgcagttgtaagagaagcttcaaaaagagttttaggaatgaagcactatgatgaacaacttatgggtggtatgatacttcatcaaggtagaatatcagaaatgaaaacaggtgaaggtaaaactctagttgctactttaccagcgtacttaaatgggttaagtggaaatggtgttcacatagtaacagttaacgactatcttgcaaaaagagatgctgagcagatgggtgagttatatggtttcttaggattaactacaggtgttattgtacatgaattaaataatgatcaaagaagagaatcatatgcgtcagatatcacttatggaactaataatgaatttggatttgactacttaagagataacatggttatttacaaagaggaaagagttcaaagaccattaaattttgctatagtcgatgaagttgactcaatattaatagatgaagctagaactccacttataatttcgggtcaaggtgaaaaatctactgaattttataaagttgcagactattttgcaaagaagttagttgtagagaaagattttactagagatgaaaaagcaaatgcagtaatgttaactgatgaaggtgttagaaaagcagaagtaacctttaaagtagccaattatgcagatgctgaaaatattgaattacaacactatgtaactcaagcgttaaaagcaaactttgccatgagaagagacaaagattacatggttaaagatggcgaagtaataattgttgatgaatttacaggaagacttatggagggaagaaggtattcagatggtcttcatcaagcgatagaagctaaagaaggagttaaaatcgctagagaatcaaaaactttggctactataacattccaaaattattttagaatgtataaaaagttatcaggtatgactggtactgcattaacagaagaaaatgaatttagagaaatttacgggttagatgttattgttataccaacacatagaccaatagcaagaaaagataatccagacttagtatttagcacagagcttggaaaaataaaggcagttgcttcagaggttgaaaaagctcatgctaaagggcaaccagtattagttggtacagtaagtattgaaaagtcagaacttgtatcaagtatgcttaagaaaaaaggagtaccacatcaagtattaaatgctaaattccatgaacaagaagctgaaataataagtcatgctggtgaaaagggcatggttactatagctactaatatggcaggtagaggtactgatatcaagcttggcgaaggtgtagttgaacttggcggtcttaaaataataggtactgaaagacatgaatcaagaagaatagataaccagttaagaggacgttcaggaagacaaggagatccaggtgaatcaacattctttatttccttagaagatgatctaatgagaatatttggatcagaaaaaattcaaggtgttgttgaaaaattaggacttcaagaagaagaagcaattgaaagcaaaatggtttcaaaagctattgagaatgctcaaaagaaggttgaaggtaataacttcgatattagaaaacaattattgggttatgacgatgtaatgaatatccaaagagaagttatctacaaacaaagatcagaagttcttgaaggcgaagatgtaaaagaagaaatattatcaatgacaaaggatattattgctgacgctgttaatacttatgttacaggtgaatcagaagattatagagaagaattcttgcatctaatggttgctttacaagatatatgtatagcgccaggtacagttaatttacctagtcttgaaaatctgtcaaatgaggaaataatcgaaagcttatttgaatcagcacgtaagttctatgaacataaggaagaagagtttggtgcagaaagattaagagaagttgaaagagttgttcttttaagagctgttgatactaaatggatgaatcatatagataatatggatcatttaaaacaaggtatagggcttcaatcattcaaacaaattgatccagttcaagcgtaccaaatggaaggtagcgaaatgtttaatgatatgattaaagcaatcaaagaagaaacagttagactgttattccatgttagaatagaagttgcaccagaaagagtaagggttgctcaagaaactgcggcaattcatgaggaatcttcaagtgccgcagctccagggccaggacaaaatcaaccaggtggaccaggtggacctagtgcagggccagtagctccagttagaaatctagataagcatggaagaaatgaattatgcccttgtggtagcggtaagaaatttaaaaattgttgtggaagagaagcataaacaagtttcaagctttgtaataagctctaaagagtttgaaaaatgataaatatgatataataaattccgtagaggtttgaagaattgttatttagaattaaatacagttttaagaaggcttctacggaattcttattaatactggattttttgaaagaggtgaataatagatgataattgaacttgaaaaggaattggttaaacttccaggtataaaaaaatctatagaagaaatgggggcttcactttgaccgagataggttagaaaaggagctcaatgagttagaatatcaaatgcaagaatcaggtttctgggataatataaaaaaggcagaagaagttacaaaaaagagtaaatcgataaaggacaaaattgaaagtttcgataagttgaagtctcagattgaagatatagaagtattaaaagaaattatggaagatgacgatgaagaatctgctaatgaaataatacaaacgttaagagatatacaagcacagattgatgattataacatgaaagtgctcttatgtggagaatatgataaaaataatgccattttgacacttcatgttggtgttggaggtactgatgctaatgattggacagaaatgctcttaaggatgtatacaagatggtgtgaaaaacaaggctatagtattgagactctagatttactcccaggagatgaagctggaattaaaagtgttactttaaaagttactggagaatatgcatatggttacttaaaagcggagaaaggtattcataggctggttagaatatcaccatataatgctaatggtaagaggcaaacatcatttgcatctatggaagttcttccggaacttacaaaggaacaagatatagaaataagatctgatgatctaaaaatagatacttatagatcaggaggtgctggaggtcagcatgttaataaaacagactcagcagtaagaataactcatattcctaccggagtagttgtacagtgccaaaacgaaagaagccaattctctaacagggatacagctatggaaatgctgaaatctaaactagttgaactaaaagaaagagcacataaagaaaaaattgaggatttaaccggggaattaaaagatatgggatggggaagtcaaataagatcatacgtatttcatccatacagcatggttaaagatcatagaactaatgtcgaaacatcaaatgttacatcggtaatggatggtgagatcgatatgtttataaatgcatatctaaagcaacaataaaagaatatatattctcttaatgaaaagtcctctatctaaatgattttatgatagaggcctttttattgagagaaattctaaaagtaaagtttatataaaataaagagcgaaaataaacttgcatatctgtatagctaagcagctttataaaatatatcgattaaagaatagacggcaataagaattatgcacacatacagggaaatattaagtccaggttttagtatagacatgattcctccaactaccaatgctatcattattactacactaacaaatttgaaaaagcctgatttgtttgttagaagagttgtgacagacgaaaacataatcaaaattaatactagaaagtaaaatatattttttaagttaattgagtaactcattatttgaaattcgtttaaagcaagtattgagagtaaaaataataatgagaaagagcaaattctactaatatttttaaccataaacccatcacctctggtaaatatttacataataattataccgttagatctttattcaagcaataacaaatttatataaaataagtattctgatatgcttagcgtatcatattagaattaataattgaaattaattcctaaaatggtatataaatatgataaaatatattcatattaatggaggagttgaatttatgaatattctaatagttgaggatgaaagggatattagaaatcttatttcattgcatatgagaaaggaaaactatgaagtttatgaagcttccgatggaagagaagctttaaatatatttgaaaatgaaaaaatagatttaattttattagatataatgatgccaaatgttgatgggatttcagttatacaaaaggtacgagccatctctactattcctataatctgtattacagcgatgggaaatgattcagataaagttttggctttaggacttggagctgatgattatttagtaaagcctataagtccaattgaattatctgcaagagtggcatctaatcttagaagatgttacaaatatgctgagcataaagacataatttattcgacaggagagttaaaactatttactgagactttcgaagtttataaggggaatagaaagattgatctcaatccaaaggaattcaaaattttaaagttattagtttcaaatttgggaaaagtatttactaagaaacaaatatatgaagaagtatgggaagaagcttattttggtgactctaataatataatggttcatttaagccatattagagagaaaatagaggatgatcctaagaatccaatctacataaaaaccataagagggataggttataaaatcgagagggttgcaatgcatgaaagctaaaagaataaaaaggagtgttacaacagagttattctttatatattttttgggatatatagctataaacataatactattaatagctattattggctcaattgttgtttatggaactttatgcggacctaatacatataattcttattttagagagctacaaaataagcttgtaaaagattatacaagtataacggatggggatttgtctgatatagatggttttatggtaaaaataaataatgagaataaagttcgttacatgaagggacatgttatcgaggaatttaaaaatataaatttgcaaagctacatgtatttatttggattaacaaaggataatgaagaatcattaaatgatgatattagaacaatgtttgcattatcagatttcaataattcaataattgaaacaaaagataatgttaaatattcactatatagcaagtatctaaaagaagaggattctttagtggtagttggcttcccgtattcagagattacaaagccgaatagaatcactaaagtaattcctcataatctaataataaaaataatgggtgcgttcaatgttctattaattctctcaatagtgtatattttagcaaaagcaacttctagcgcatttataaaaccaataaagacattattggctggagtaatagagatatcgcatggtaattataatatacgtttagatatagataaaaagaatgaatttcttgagttagcaaatggattcaatatgatggcaggaactatacaaaatgaaagaagccaaaaggaaaagctagagaagataaaagaggggttaatattagatatatcgcatgatttaaaaaaccctctttcatcaattctaggatatagtgagattttaattaataataatgatttagatgaaaaggaaaagttagaatacttaaacataataaataagaattcacaaagagcaaataaattaataacagacttattcgaattttcattatatgataattctgattataaaatgattaccgtaaaagcagatattgctgaatttgttagacaaataatagcaaactatattccagaatttgatcataaaaaattcgaatatgattttgaaataattgaagagacctattatgtaatgataaatgaagaaaagttatctagagctataaataatgttttggacaataaagttaaatacaatcctgtaggaagtagaataggagtaaagacagaggtgagagataattatttttacattatattatcagataacggtgaatgtattcctcaaaaatacagagaaaatatatttaacccatttgttagagttgataaatcaagaaactcaaaaactggaggaacaggacttggattatctatcacaaagaaaatattaaataaacataatggtgatattagaattatagatagtggtggaatagggacaacttttgagatcatgttgccacttgttgtgtttaagaataaaatctaaatttaaagcttggatcagcgatttatattttaggttaatttaatattgttgtaagcagcttttaataaaaggcatttatactaagtatagcggaggaggagttggagaaggcagtatacattattcttagtatagtttattaaaagtaactttagcttaatgctttaacatcatgtataagaaagagaaggaaaatttatggacaacgataaaaatgaattggaaaatattaattcaaacatagattatgataatttgaaagaagaaactggtgccattaatacagaagaacactttaaggaaaatggtttagttacaaaattaaaagataaaaaaggaattttaggagcagtcggagcttttctattaatacttttgaaatttaaagctattttatttttagttctaggaaaattaaaattcttaataatattattaaagcttggtaaatttgcatctacctttatatctatgctactaatgattgtcatatacgctaagatgtatggagtggcatttggagttggctttgtattattgcttttaattcatgaaatgggacattatcttacggctaaattaatcaaattagatgtaagccttccaatcttcattccttttgtaggtgcttttattagtatgaaagaagaacctaaagattcagcaacagaagcgaaagttgctataggaggtcctctgttaggaagtataggtgcactaatttgtttattgttttactttatatctggagaagactttttggcagcactagcatatgtaggttttatgttaaatctatttaatcttatacctgttcatccgcttgatggtgggagagtggtttcggctatatcaccaaagttatggctcataggaataccaattggtataattgctctctttaaggcctttaatccaattattgtactattgcttatacttggagttgcaaaagttattgaacaatatagaaatccagataaatcgtattacgaagtaaagacatctattaggtttatatttgcattaagttattttggattaatgttacttttgggcattgggataacatatatccatggaattcattcttctatacttattcaataaaattggaggggataaatatgtattttaatataccagaaacaaaagatgttcttattaaaaacttgataggtgaaagacttaaaggatatatatttaagctttgagggaattgaaaaacatccattaaagatatccaatataagaaagaatgggcaatagttaagactttaattttaagttatttgaatagagtaacagagcttaaactctgctattataacgacgggcaaaaacaagaaatcgtagtatataatgaattgagcaaaaatgatttaagaaaattaattcttggaattagtaatgaaaatgggaaactgaaagtgaggacaactgtagaagaaaaatatatataattattgctttcaattaaaataagtttataatattaatagtgatataggattattgccattactaaaaatagtaatggcaataatgatttatatggtaaaatagtattgttgtggcaatgactatttaggtaatttaatataagcaggaggaaattatgaattcaattgaagaaagaatcgcaaaagaattagaaataaagttaagccaggttcaaaatgttattggacttttagatgatggaaatacagttccatttatttcaagatatagaaaagaagcaacaggaggactttcagatgaagtcttaagaaaattatctgaaagacttacgtatctaagaaatttagaggaaagaaaagctgatgttacaaggcttatacaagaacaagaaaaatatactaatgaaataggaaaagcattagagaatgcaacgactttaacagaagttgaagatatatatagaccttttaaacctaaaaagagaacaaaagcaacaatagcagtagaaaagggattaaagcctcttgcagaactaattttggaaggaaaattaagtggagacctagatgaagaggcagctaagtatataagtgaagaaaagggagttacaaatagtcaagaagctatccaaggagctttagatataatagctgaaagcatttctgatgaagctaagtacagaaagtatataagagaatttgttattagagaaggtaatatagaatcaaagggaagttcagatgaaccaactccatatgaaatgtattatgaatattctgaagcagtaaataagataccgcctcatagaatattagccataaacagaggagaaaaagaaaaaatcctaaatgttaagataactgttaatgaagacaagataattcaatacttagaaaatcaagtattaaaaggcaatgaaactttagatgaaaaattaaaacttgcaattagagattcgttaaaaagattaatttatccatcaatagaaagagaaataagaagtgaattaactgatataggtgaagaaggtgctattaagatatttaaagaaaacttgaaagcattgttattacaagcgcctattaaaggaaaagtagtaatgggatatgacccagggtttagaactggctgtaaaatagcgattctagatgcaacagggaagtttttggaaaatacagcagtatatcctacagtgcctaaaagagacatcgaaggaacaaagaaaactttaaaagctcttattgctaagcataatgttgatgttatatcccttggaaatggtacagcatcaagagaatcagaagaagtcatcgcagaaatgattacggaaataaaaaatgaaactggaaaagaattagcatatgtaatagtatctgaagcaggagcgtcagtttattcagcatcagaacttgcaactaaggaatatccagatttagatgttacagtaagaggagcaatttcaataggaagaaggttgcaagatccacttgcggaactagttaagatagatcctaaggctataggagtaggacaatatcagcacgatgtcgctcctaaaaagttagaagaatccttagcaggtgtagtagaagattcagttaacactgttggagttgacttaaatatagcaacaccatcgcttttaacacatatttcgggaataaatgcatctatcgctaaaaatattgttgactatagagaagaagtaggaagattcacttcaagaaaagaactattaaaagttaagagattaggtcaaaaggcttatgagcaatgtgctggatttttaagagttgatgatagcaaagaacctttggataatacatctgtgcatccagagtcttatgctatagctaagaagctaatagaattacttggttacaataaagaagaccttaagaataataaattaggtgacattgatgaaagggctcaatctcaaggattaaaaaaactaagtgaaacattggaagttggagagatgactctaaaggatataataaaagaattaaagaagccaggcagagatcctagagaagaaatgccaaagccaatactaaaaacgggaataatagaacttaaggacttaaaacctggtatggttttagctggaactgttaggaatgtatctgattttggagcatttgtagatataggagtgcatcaagatggattagttcacaaaagtcaaatggcaaatagatttgtaaagcatcctttagatatagttaaagttggagatatagtaaaggtagcgatattggaagttgatgaaaagagaaagagaatatcattaactatgaaagatattgatgaatcagcagaagtatagttaacataataaattgaatttaaagtcttaagagtatggatatatttattcttaagacttttctgcttacaaactttttataggcagaaatatatgattgcatactaataattatttaatacgttccaaatattgcggatatttttattctaacgattagcgtgtataaatgaagagtatgatatagtaatatagaaaagtatttttaataagtaaagatgaataaaattgcaggtttataataaggaggaaaagcaatgattagatggggaattataggacttggaaatatagccttaagatttgcgaagagtttatcatactctaatgaaggtaaactatatgctatagcatctagaactaaggaaaagcgtgatgaattttatgataagtataattgtgagaaagtttatgaaaattataatgaattattaagagatgaagaagtggatgctatatatatagcattacctcacggctttcataaacactggtccatcgaagctttaaggcataaaaaggctgtgctttgtgagaagcctgtagggataaattcagaagaaatgaaggaaataaaaaaagaagctgtgttaaataatacattctttatggaagcaatgaagacaaggtttattccgataattagtgatattaagaaagtaataagaaataaagagattggagatataacggctatagaagctaatttttgcaataatgtagaaaacattaaaccgggatcatatttattagataaagaccaaggtggggcgttactagatgtaggaatttatccattgtcattcgtaatggatatgatcgattcagaggttaaaagtgtcaaatcttacatggatataaatgaatcaggagtcgattcctattttaaagcaatactttcttttgaagatggagtaataggaactgtagaaggggcaattgatagaaataaagaaaggacagctattattagaggaacaaagggatggatggagattccgatgtataatagaccaaacaaagctgttgttaatctaaattcgggcaagtcgtatacaattgaaaaagatatagaatttgatgacatgtatgcagagattaaagaaattcataactgtttaaaagagtcgaagcttgaaagtgattatttaactttaaatgaatcaattcgagttatggaagtattagatagaattagaatgaatgcggaataaaaagtgattggatgaactacttacaatgattaggcgggagagagaaacatataaaatggatgaagtaaaagtttatactaacagaaaaaatattgtacttttagcaacattgtgttgctttttatggggaagtgcatatccggctataaaagttggatattcactatttaatataagtgatgtaggctctaaattaatttttgccggatataggtttacacttgcaggtatttttatactcatatttgagcttatgtcaaaaagagttatatttaaatttactagaaagcagtttggtcagataacattattagggttaactcaaactgcacttcaatatatattcttttatgtgggaatgtcatatactacaggggttagaggatctataataaatggaacaggaacttttgtaagtataattctagctcattttatatataagaatgataggttaaatttaaataagataataggatgtgttattggatttgtaggagtagtaattgttaacttaaatggagagtcattaggaggaacatctgtcacttttaaaggtgagggatttataatggttgctgcaataatatttgctgtgtcagcaatatatggcaagaagataacgcaaactcaagaaccttcaatagtaactggttttcagctatttataggaggaattcttcttacagcattaggatttgcattaggaggtagcttagaaggatttacagcgaaatcaacattactacttatatatatggcactactatcatcaatagcttttactgtttggacacaattattaaaatataacaaagtaggattaatatcagtatttaattttttaatacctgtatttggaacattgttatcagcattaatcttaggagaaaatatatttgatatcaagatattaatagcgcttcttttagtttgttatggaatatttctagtttatagagttaagaaagaaaagtagaatggggatattgtgtacatccttcctcaagtaaatgaagatggaaaagagaatactttgatgaagcttgagataatgaaaaaggagaattaacatatgttaaaagaaattcatgataaactgattgctctgacagatgaagaagtaaacattttaagtggagagaattctgtaaatagaagcatttatacagacgatggaagtttcattgtagatagcaataaactactaccaagtggggaactaatagatattagaaagcatattagatttattaactttccaagtcataatcataattacattgagtttaattatgtttatcaaggcaagcttactcaaatcatagataacaatgaaataactttacaaaagggcgaattaattttcttgaatcaatatataactcatgagataaaagcatcggacaaagaggacataattattaactttataatcaggcctgaattttttgactatataataactctgttagataaagaaaatatagtaagtaaatttttactaactacattatatacagattatgatgaaggagaatatctatattttaaagtttctgaaagaaaaaatattcaagagttattagaaaaaataataattgagctgtatactaattcgataatgaaaaaagcgacaataaaattgctagtagggcttttattagtggagttagtaaaaaattcacaggatatagagacatattctgtggataactatgagaagatgttgataattcagagtcttaaatacatagaggaattttatagtacagctactctgctagaactctcagaaaaattaaatcaaccagattataaacttagcaaattaataaagaaacatactaaaatgacttttaaagaattattgcaagaaaaaaagttaagcaaagcagttgaattaatcaaattaactgagtattcgattattgaaataattgagtttgtaggatatgagaatccaacatacttttacaagatattcaagaaaaaatttggaatgacgcctagagaatataaaatgaacagaattaacaattttagatttacttaaattagaaaagtttctaagttgaaatgaaaggaatatataacttttaaataattcaatttatgtttaaaaattatttattccgcagtgctatagtttagaataaattttaataagttaatctcttttaacatatataatgcataatttaagaatgaagaagctatcttaatgaaaagctgagagagctttttttgttaataattgagatgctttgaagttacttactttgaattgaaagaggtttaacattatgctatgattattttagtaaacgttatttttgtaaatattagggcatagagtgtgggcaaattaaattttaaagataataatgaggggtgtagagatgagatatttagtgttagatgttggtggaagttctattaagtatgcactgatgacagaggatttggagtttattgagaggggtaaaaaaccaacaccacttgataaaattgaaagttttatagatgtaataggtgaaatctatgatatatataaagatgatatagaaggaatagctataagtatgccaggagtattagatagtgaaaaaggttatgcttatacaggtggtgcactatcatataatgaaggtaaagagattgtaaaaattcttaaagaaagatgtccgataaagattacaatagagaatgatggaaaatgtgcagctttagcagaggtttggaaaggaagtttaaaagatttcgatgatggagttgtaatagttctaggaacaggtgtgggtggaggaatagttcgaaataagaaaatccacaaaggaaaaaacttctttgcaggtgagtttagttttataaatacgaatgtaaataatactgagaatacggatgagtgttggggatctataagtggttctaaagcattgataaatgaagttgcaaaggtaaaaagtcttccgccagatgaattagatgggtataaaatatttgaatatgcaaataacaacgatccagatattcttaaaattttagatgatttcacttataagctagcggtacaaatttttaatttacagtgtatattagatccagaaatatttgcaatcggtggagggataagtagtcaagagatattgatacaatatattaagaggaatgtggacaagtatcagaagagttttgaaattgatgatttaccactacctaatgtagttagctgtaagtttagaaatgatgctaatctcataggagcactatacaattttataactagcaaatgaaatatgattgtattaaatgttggtggaattttatggaagaatgtcattagcatttagcttttctaataataacattatataaattaacttagtaataatatataaaatggagtgattctttttagaatcactccatttaatataaagattttatattaaacgttgaataacatatcgctataagttggaagtggccagaactcttcgtctactagagtttcaagcttatcagcatcagctcttaaagtattcatttgttcaaatacttcgtatctgtacatcattcctaaatcgaatatatcaccttcgaagttatcagccttttcaactgctttttcaagaagtgaaacattcttatttaatgaagctaataaagttgaaatttcagttaatgattcagtttgaactgaaatatctacatttatacctgtagcctttattgtgtttattgattcagcaagacttgtagtatattgaattacagcaggtataatttgacgttttgccatttcaagtgttgttaaagcttcaatatttataattttattgtagttttctaaagtgatttcataacgagatgttgattctactctagttaaaactccatgcttttctaatacagcttgattcttctcatctatcatagctttagcagcttccacagttgagtgaatatttggaagacctcttctttctgcttcagcaacccattcatcggaatatccattaccattaaatataattctcttatggttcttaacaatatcagttaagattgcttggatttcagcatctaaatcagtagccttttcaagtttatctgcaatttcagataaagtttcagcaactatagtatttaatacaaagttacatccagcaattgaagcagaagatggaaccattctaaattcgaatttgtttccagtaaacgcaaatggagaagttctgtttctatcggttgcatcttttggaagtggaggtaatgtatttactccaatagttaattcacttgcagacttagaacttgtagctggacccttttcaatttgttctaatacatcttctaattgatcgcctaagaagatagagattatagcaggaggagcttcgttagcacctaatctatgatcatttccagcattagcagctgatactcttaataagcttggatattcatcaacagcttttattacagcacaaaggaataaaaggaattgttgattttcgtgtggagatttacctggttcaagaagattcattccatcatcagtacccattgaccagttattatgcttacctgatccgtttacgccagcgaatggtttttcatgaagcaagcaatataaatcatgttttgcagcaactttcttcattatttccattgtaagttggttatggtcagtcgatatatttgttgtgctaaatataggagctaactcatgttgagcaggagcaacttcgttatgcttagttttagctaatattccaagcttccaaagttcttcatctacttctttcatgaaatcagaaattctttgtttgattgttccgaagtaatgatcttcaagttcttgaccctttgaaggttttgctccgaataatgttcttcctgttaagataaggtctttacgagcatcatacattgacttatcgattaggaagtattcttgttcaggaccaacagttgtaattactcttttagtagtagtattacctaatgcttttaaaacacgtagagcttgtttgtttaaagcttccattgaacgtaataatggagttttcttatctaaagcttctccgttataagaacagaatgcagttggtatacataaagaaccatcttttaggaatgctggtgaagtacaatcccatgcagtatatcctctagcttcaaaagtagctctaagtcctcctgaagggaatgaagatgcatctggttcacctttgattaattcttttcctgagaattctaatataacttttccgtcagaagttggatttataaaagaatcatgcttttcagcagtaattccagtcataggttggaaccagtgagtaaagtgagtagcacctttttcaacagcccaatctttcattgcagctgcaacaacatctgctacatctggttcaagagtagttcctttttcaattgtcttttttaaagctttataagtagctttaggaagacgttctttcattacagcatcgctgaatacatttgaagcaaaaatttcattgattttgttcattaataagatctcctttcagaatacacaacatttatttaaattaatattaactaattaaaaacattaataatttaaaaaaaattttagagtataaatgataaattgtcaacaagaaataagaaattgccacatggaagttatttacatataaattcatatatggtaaaaaattcatattaaaaaaataaaaagctaaagaattattttaatattctctagctcctttgctaaaatcttattcaattaataaattaaacatagttaatatataacactcctaagactgccatagccttaagtattttctataataattatactatattgttgtaggttgtacaatacaaaaatccgattttttgcagtaagaaattagtagaaatttaaatatttatattacatttccactaattttatttaaatttatgtagtaagttaaatataattgtttttatagagaacatatttaattatagctaagattagtgggatgagattcttgctcagtctaagattataaggaggattttcaataataatttaacctagtgttatttatattatgtagtaattcaagatataaaaaattatattaaggagactgcaaagttttataattgcaaataaggataataatttatacaaatgccgatattaaaaatagttttttcatacaatataatttaaatatagagtgatgtgtgaaaagaacaggaggagagatatggagtactatttagctattgatattggggcttcaagcggaaggcatattttaggttcagtagaaaatggaaagataaatttagaagaaatatatagatttgaaaacggaattagcaaaataggaaatgaatattgttggaatatagaacaattatttaatgatataaaaaaaggaattaagaaatgtaaggaaatgggaaagatacctagtagtataggaatagatacgtgggcagtagattttgttttgttaggtgaaaacgataagatacttgggaatgctgtagcttatagagatgataggacagaaggaatgatggaggaagcatttaaaatcattccgaaggatatgatgtatttatatacaggtatccaatttcaaaggtttaatacggtatatcaattgctttccttaaagaagaataatccggaaatattagataaggcaaaaactttcttaatgatacctgattacttaaattttttacttacaggaaaaaaggtgaatgaatacacaaatgcatcatcaacacagttagttaactcttttgagagaacttgggatgaaaaaatactggatgagctaggaattaagaaggatatctttcaagagataaaattacccaaaactaatcttggtactttgagaaaagagctagaagaagaatttggatttgatatggaagtaatacttcctgcgactcatgatactggttcagcatttatatcatcagtttgtaatgacagcgacagcatttacttaagttcgggaacttggtcattgattggtgttgaaaatagattcccaatttgtgtgcctcaagctatggaacataattttacaaatgaaggtggaatagactatagatatagattcctgaaaaacattatgggtctatgggtaatccaagaagttagaaggaatttagataataaatattcttttggacaattagtagatttggcaaaagaacatattgatttttcatcaatagtagatgtagatcatgacagattccttaaaccagaaaacatggttgaggaaattaaattatattgtgttgaaactagtcaaaaggttcctcaagaggtaggggagatagctatgtgtgtgtttaatagtttagctcactgttataaaaaagctgtttctaatttagaggaaatctttgaaaagaaatttgaaagaataaatatatttggtggaggctgtcagaataatcttttaaatgagctggtttctaaagttacaggtaaagaagtacttgcaggtccagttgaagctacagctataggaaatattgttgctcaaatgatgagtaaagatatttttaaagatttaagtgaagctagacaagtaataaaagaatcttttgatattaagatatttaaatccaattaatttgttcactctctcacaataatacaaactacaatattcaattctttactgctatttgtttggaatatatagtggattattggatattgcaaataaagataatcagtaaatttaaatataaataggaggcgtaaaaatgaatgttaaagaaaaatatgaattagctaaaaaagaatatgaaaaatggggaatagatgtagataaggttttggatgaacttaataaagttaaaatatcaattcattgctggcaaggtgatgatgttaagggatttgaagtagttcaaaatgagttatctggaggaattcaatgtaatggtaattatccaggtgcagctagaaacgctgaagaacttagaaaagatttagataaagcattaagcttaattccaggaaaacacaaagttaatcttcacgcaatttatttagaaactaatggcgaatttgtagacagagatgaaataaagccagaacattttgcaaattgggttaaatgggcaaaagaaaatgggttagggttagatttcaatccgacaatattttcacatccaaagtcagcagatggattaacactttcccatcccgataaagagataagagacttttggataagacattcaattgcatcaagaaaaattggagaatattttggtaaggaattagggcaaacttgcttaactaatatttggattccagatggatacaaagatattccgagtgatagattaggaccaagaagaagacttaaagaatctttagatgaaatttttaaagttcaaatagataaaaaatataaccttgactgcgttgagtcaaaagtatttgggataggggcagaagcttatacagtaggttcaaacgaattttatttaaattacgcagctaaaaataacataatgtcattaatggatacaggccactaccatccaactgaagttgtttcagataaactttctgcaatgttattattcgatgaaaaagtagctcttcacgtaagtagaccagttagatgggattcagaccacgttgtagtttatgacgatgaacttaaagaaatagcgaaggaaatagtaagaaacgatgcattagatagagtaattattggtcttgatttctttgatgcaagtattaatagaattgcagcatggacaattggttcaagaaatatgataaaagctttattaaatgcaatgttaacaccgaatgataagctaagggaattacaagaagaaggaaacttcacagaaagattagctttaatggaagaatttaaaacttatccaatgggtgatatttggaattactattgtgaaaagaacaatgtaccagttggtgaaagctggatcaaggaggtaaaggaatacgaaaaggacgttttgtctaagagaaattaatttaggtttgtaataaataatattcaatttgtaaagataatatagtatttaacaataaaatataaaacaaataagtttatagcggttatgtaattgactataaacttattatacaaggagagaatattatgaaaatggaaattagatactcaaatcatccagaagattctaaacagtacgacacagaaacgttaagaagacattatttagttgagaaagtatttgtcggtgacgaagtgaatttagtttatagccataatgacagaatcatatttggaggaattacaccagtaaaagaaatattaaagcttggagcttctaaagaattaggaacagattactttttggaaagaagagaacttggagttattaatgtaggtggagaaggaacaattatagcagatggagtagaatataatctaaattatagagatggattatatgttggacaaggtactaaaaatatagaatttaaatcagctaatggaaaaaagccagctaagttttatataaattctgcaccagcacttaaatcatatccaacagtaaaaatagatttggaaaaagctaataaaataaaatgtggcgatgaaataaacatgaataaaagaacaataaatcagtatgttcatcctgcagtatgtgaaagctgtcagttagtaatggggttaacaatactagagcagggaagtgggtggaacaccatgccatgtcatactcatgaaagacgtatggaagtatacttatatcttgatgtacctgaagatcaagcagtaattcattttatgggtgaaggacaagaaacaaggcatatagtgatgaagaatgaacaagcagtaatttcaccaagttggtcaatacattcaggaattggaactcaaaattattcatttatatggggaatgtgtggagaaaacaagacttttggtgatatggatcatacaaaaattaacgaattaagataaaagcagaaaagaggaagtggaattatgtcaaatattttacatgaattttcaatggatttttttagattgtatggaaaggtagctatagttacaggaggaaatacaggacttggtcaagggtatgctgtagcattagcaaaagccggtgctgatttaattattccaacttatgatacaaattgggatgaaactagattgttaatagaaaaagaagggagatcagtaacatttgttcaagcagatttgacaaaaaaagaagatagagaaaaagttataaaaatagcaatggaagtgtatgggaagatagatgtattagttaataatgcgggaacaataaggagagctccgcttcttgagtacaaagaagaagattggaatgctgtaatggatattaatttaaacgcagtatactttttaagtcaagaagtcgctaaaatcatggtaaatcaaggctcgggtaaaataattaatatagcatcaatgttggcgttccaaggtgggaaattcgtaccaccttatacagcaagtaagcatggagtggctggaataacaaaggcattcgctaatgaattggcaagcaagaatattcaaattaatgctatagcacctggatatataaaaactgcaaatactgcaccgataagagcagataaggaaagaaatgcagaaatacaaggaagaataccagcggatagatgggctgaaccattcgatttaatgggagcaatagtatttttagcaagcagagcatctgattatgttaatggacacatattagccgttgatggtggctggttagtaagataattataaaaatcctgtaacggcgatataaatgccttgttaaaattatatgaatattttaacaaggcatttttagattgttgtattggatactactcaagcaatacaatataattgcaaatgcctgtaaattaatagaaatttgaatctaacaatagtttaataaacatcatgcattgatgcgttgaataagatagcgtatggaaaagaaactccagaaatgtgtgctaaagaagtgtatgatagtttagatagaacattaggcagtataagaaaatattaaatattagagaaaaattaataatcccctttctcaaaatagaagatggggattatcaatgtataaatttaatatttgaagcaataattcaaatatataatatttttagaacaaattagtattaacaatcaatatggttaagtgcttcaacaagagccattatagtcaatgattggccatatgccattggggctataattatattcctatagtgttctttattatagcccattccagttccaccagatacatttaatacagttccatcttttgctatattattgcaaattgcttctatagctttttgaccagcaggtttaaatgaatcgtctaatatccctaatcttattcctgttagtatcccagcagcaattgcagctgagccagatacttcttcatagcttgtaggatcatctataactgtgtgccataatccagatttagattggtatttaactaaagtcgttacttgagccttaaatgtatcaattagaaatttctttaggcctgaattcattttaccgtcaaacatttcaatataatctaagattccaaatgtgaaccacgaattacctctacaccagaatacttctccaaaattactattttcattgaaactccatccgtgatagaatagacctgattttttatcatataagtattttatatgaataaggacttgatgaattgattcattaatccaatcttgtctattatatttttgtcccattctatttaaaaataatacagtcataaataaagtatctatccacatttcgctttcgtttagcctaaccccttgtctatcgccattagcactagtaacatgttggaatccaccttctttagttcttggaagacagttcataagccaatcagcccattttaggcaaaggttttcaaaatctgtatttggacttacatctaataggtttataagtgttaatagaggggcagttgtattaatgttttttgatggtaatccattcgatatattatttttataccattcatttaaaaaatccagatatttgttacttttatcatgtttgtctaactttaataagccatataaacctacaccttgtggccaatcccattcttgaattccaaaatctcttggaaacattcctatggcttctccgccttctttagttaatttttcttcatctgttggtctatctaagtttaaaagtttatcaacaactaagtcaagttttgtacgtaattctttttctgttaatttcattttatatcacctcataatatttatttgtaaagagcattataaacaatactctaaagtttttgtattttgaaataatgaataaaaggtatcggtgtaacgattaattacaataaatttaaatctcatgtaagtgttaacaatatagttattataataacttagtgaatttattgtagtataaattaaattttcctatcatttattctcaattcaaattatacatcacgaaacaaaataaatctacataaaaacaaaataaaataaagaaaaagtaaaaaagaaagtgattatttagtagtgagaattaagggggggaattaaatataattagaggaaatccttgagaatagtgagcttggataaaattaaagtaaggaaatatatatattgttttatgttgtttttaaaaataaagcaagtaaatgatgttgagttttgttaaaaaagagtttattatctatataaaactatatttattttgagaaaggaattacgattatgagaattggagttagaggacacgatattggactttataagttagatgatataggaagaataatgaaggaaaaagggttaaaaagcgttcaattcgtagcgaaaaaaataatatctgaatttgaagttactagaggatgtatgacaccagggatggcccaatacataaataatactttgaataaatatgaagtaaatataagtattcttgggtgttatattaatttagctaatccagatgataatgaacttaaggaatcattagatacatttaaagagcatatacgtttcgcaaaatatttggggtgtaatgtagttggaacagaaactggagcttttaataaggaatatatttatacagaaaagaataatacagaggaagcctttttaaggagcctaaattcaatacgaatacttgtgaaagaagcagagaagttcgggattgtagttggaatagaaggggttacaaagcatataatgaatactccagaaaggttaaaaagagctttagataatgttgaatcaaataacttacaagttattttcgatccgattaattttatagacgaaagtaactatgataaacaagacgagataataagaaaatcttttgaactatttggtgataggatagtgattatacatgcaaaagattttatctataaagatggaaaggtacaacaagtgtctattggaaaaggtcaatttaactatccattattactaaaactaataaaggaaagaaaaccatatatagatataattcttgaggatacaatacctgaagatttagattcaagtattaaatatatagaagaaatatacaagagtttataatgaataattaaatgtatatataaaattagaaatagcatggaaatttatgttttctatgctatttttatattaaaaaagtattaaatacagatttgtgataaaggagggaagataaatattgtactaaaacgttaacatataactatttgagattgtttttaaaacaaaactaacataaacaaataaaaaacaaataaaataaaagaaattatattgactttgtgttggaatggaagtaatatataagtgtaagtgatgtaaatgttttaagtaaccgatgacaagattaaaatgttagatattagaatacttaggaggaatgtcatgataaaaagaattttataaaaaacttttggtaaatgacacttagatatatttaataaatacatactatataaaatattaagagaaattgatttgatgaattgaggaagaatacagaattaaactaagaattaaaaatggacatgcattagtcatattatagtattttatttgtagttctttagagtttatattaaagctataaaacgttgatacttaaatactatgtaaaaaataaaatttataatatatgtaggaggaaatatgagtaagaaagatgggaaaataagatttataaattatttttcttatgggatgaatgattttataggagcaggagcatttgccttaacaagtgcatggttattatacttttatacaactttttgcggattaacaccaattgaagcgagttcaatatttgcattagctcgtatagttgatgcagtagcaagtccgacaatgggattcataacagataattttcacaaaactgcgcttggaagaagatttggaagaagaaaattctttttattagcagcaatacctttaattattgtatattcagctatttgggtcagtggtttctcttatttatattacgttgggacttatatagcgtttgaaatcgtgtatacaatggtacttataccttatgataccttagcggcagaaatgacatctgattttaaaattcgtgctaagcttactagtgcaagaatgtatattgcccaattttcagcatttttagctgcatttatacctggaagacttataaatacattagggaaagagtctccacaatcatttttgattgctggtggaatctttactgtaatatttataattgttttaattcttgtgtatacatttacttgggaaagatctttagaggaaatagagatattagaaggcagacactcaaaggaaaagttatcatttggacaaaatgtaatgaaaatttacatagatttggttacaactcttaaaattagaacgtttagagcacatttaggaatgtatatcggaggatatttagcacaagatacatttaatgcagtatttacttatttcatagtgtttgcattatttaaaggtgcagttgtagcatcaaacttgttggcattaatgtatatattccaaattgcaggagttggtatagcaacttattgcacattaaaattaagtcctggtggagcatttagagttgtatcattaatattccttgcaagtattgtaggatatttaatagtatatggaacaattcctgatagccttgttgcactatatgttgtatcggcattagcaggactcggacgaggtggaataaactttgttccttggaataactatacttttgttccagatgtagatgaaatagtatctgctgatagaagagaaggcgttttcgcaggatttatgagtttgttgcgtaaagcttcacaggcacttgctgttttcctagttggagttatattacaagaatttaactttaaatctggatcaacatcacaacctccagaagcattaacagctatggcagttatattaatagttgcgccggcaatactgcttgtttatggtataatatcatcatataagttcaaagtatctcatgaatcgcatgaagtacttaagaaagaaattgcaagattaaaagatggtggattaaaagaagatgtagatgctgaaactcgtacaacagttgaagaattaacaggattaaattacgagaatgtatgggggaataacaaagtagggtatagaaactggagaagatacaaagaaaatcaaaaagcttagaaaatatataatataaaaataatctgcattggttccaaaatctatttaagtgaatagtgaaatcaatgcagattatatttttatgcaggggaaaacttattagtgcaatgtttataattgcactaataagtttttctctatttgtttaattcaaataattattttaagttgaacacattagataattccacagatattggactattatcaggatttgtttccataatgtctttcataaatgcccaccactttttacaggcatctgtttcggcaatttcatcccatagttcttcgttctccatttctatataagaaaacaatatattggtgtctttatcataaaatattaaatattttgatgttccgtgagattttaattcctttacaaggtctggccaaatttcgttatgcctttttttatattcttcttctttaccttcaaataatttcattttaaatgctttttgtatcataaatacctccttaaaaagtataagttacttatattatatagttattcggaaaaaacagtcaagaattaactttgatttatattgtgttgtctgtgttaatttggtatattaaagttggattgattaaatacaaaaaaatatacgctatatttgaattgtcttacatatgatttaaaatataattatataataggggtgaataaatagaaacttattcatataaggaggaattgtaatgttacctagagaaagactagaaataataaaggaaatagcaataaaggaaaagaaagtttatgtatctaagctgagcaaagagtttgaagttacagaagagaccataaggagagatttggaaaaactagagttgcaaggagtagttactaggagttatggtggcgcaatattaaatgttgataaaactaacgaggatgtgcctttttataaaagatctaggacaaatatagaaagtaaacaatatatagcattaaaggctatagagtttgttaagggaagtagtacgattgtcgctgattgtagttcaacagtatttgaggcattgaaattaattagaaatagaaatgatgtaactgtaataacaaattcagtggaagtattacaagagttaaaccaatcggagttgaatattatatcaactggtggtggcttggatcaaagaactttgtcgttacaaggaccaataacacaaaatgctattaaaaattataatgtggacatagcatttgtaagctgtaaaggaatggatataaataaaggaatattagactcgaatgagacagaggcagaaattaaaagatctatgatcaaacaatctaataaagtcattttgttagtggatcatagtaaatatgataaaacatcatttgtaaagctttttgattatgaagacatagactatttgataacagatattgaaccaaatgaagaatggattaatttactgcatgctaataatgttgaggttatatattgatgtacatatagaaaaggttgtagaatcacttaaaataaataggtgattctttattttttgataaaaatgctaataaattagttataaatgctagttttagcagatcttaatatactttaataaagctctataaggatatgttgtttttaaaatattaatacaaataaaaacaaataaaaacaacaaaaagcaattgaaattaacaaaagaatgaagtataatttatttataagataaaattaatctggaattaaaatgattagtttgtatctttaatcggtgaataaagttacatacatttacaaaatagaattatttaaaatggaccaaatgttaaaatacataataaatatatgaaagcaggagaaagtatgacaatagaagatatgaagtttatacaaaattttaagaggatgacaaatgatgcgtggcttaaaggatggcatgaaagaaatggtggaaatataacttatagattaacaaaagaagaagtttctgcaattaaagaatttatcaacgaagattcggaatataattcaattggtgtaactgtaaaaaatttagccaatgaatatttcttagtaaccggaagtggaaagtttataagaaatatgacagtttgtttaggagaaaatgcaggaataatcaaaatagatgaaaagggagaaaactataaggtagtttggggattgtcaaataatgcaagaccaacaagcgaacttccttcacatttaatgagtcactcaataaaagtagaaaaaacaaatggatgtcatagagttataatgcattctcatactacaaatgtaattgcattaacgtttgtattgccattagaagaaaaagtatttacaagagaattgtgggaaatggcaacagaatgccctgtagtatttccaagtgggattggggtagttccttggatggttccaggtggagctgcaattgcagaagctactggtgaactaatgaaggatcatgatgttgtaatttgggcgcatcatggaatgttttgttcaggtgaaacattagatctaacttttggattgatggatacagtagagaaatcagctgagattttagttaaagttctatcaatgggtggaaagaaacaaacaattgtttctgaaaattttagagatttagcaaaagactttaatgttagtatttctgaagattacttagtttaataaagttattttgagactagagtgaaaattagcttaagtataaccctatctccgtataaaattagtctcagacaacttattatatatatcataatatggaaacaatctagttgttatattatgtatagtaactagattgtttaataatgatagatatagatatgatttttatatgtatataaacagttagtattataaaaatagttaactacaatataaattgaaaacgatttataaattataaatatgagattgcactttgctgataaattattattatataaaattcggtggatacattatacagttatcaaaattattaaaggagaattgatatttatgacaaatagaatgatattaaatgagacaagctatataggagcaggagcaattgaaaatattgttactgaagctaaaataagaggctataagaaagcactagttgtaacagataaggacttaataaaatttaatgtagcatctaaagttacaaatttattagatgaaaatgatttgatttttgaaatttttgatgaagtgaaagcgaatccaactataaatgtagttttagctggtatagagagattccaagcatctggagcagattatttgattgcaataggtggaggatcatcaattgataatactgcaaaagctattggaattattgttaataatccagaattttcagatgtaagaagtttagagggggcagtagaaactaaaaataaatgtgttgatataatagcagttccaactacagcgggaactgcagcagaggtaacaattaactatgtaattactgatgaggaaaggaaacgtaaatttgtttgtgttgatcctcatgatattccagtaatagcagttgttgattcagaaatgatgtcgtcaatgccaaaaggattaacagcagctacaggcatggatgctttaactcatgctattgaaggatacattacaaaaggcgcttgggaattaactgatacattacatttgaaagctattgagataattggacgttctcttagaagtgcagtaaataatgagccgaagggaagagaagacatggcccttggacaatatattgcaggtatggggttcagtaatgttggacttggaattgtccactcgatggcacatccgcttggagcgttctatgatacaccacatggaattgctaatgcagtattattgccatatgttatggagtacaacgcagaggcaacagataaaaagtttagagaaatagcaagggtaatgggtgttgaaggtgtagacaatatgtctcaaaaagaatatagaaaggcagctattgacgcagttaaaaagctttcagaagatgtaggaattcctaaagtgttaaatgaaattggtgtaaaagaagaagatttacaatcacttgcagaatcagcatttgttgatgcttgtactccaggtaatccaagagatacaagtgtggtagaaattttagaaatttataagaaagcttttaaatagaaaaatagttttaggatgggtatataattatattcatccttttttatatgatagaataaaatatatgattctatcatagtttttgagattatgaaaattttagatagagataagttaggagaactgtattagatactataaaatagagttttatgttaagatattaagtaacaaagtttctagtctaattaaagacattagtttttatatggagataataaaaagtatgttcaggtatgttagcgacataagcatgatttcccactatataattaaagaattttgaagaataggagtgtagcaatagatgcgacattggggttatgatactgattttttagtgaaagttttttaaaatgtatgcttttgaagtggaaaagtgtgcatgtgaagaatcgcctattctaattgtagtagaaaaaaataatattgcgaaaaggaagtgtattatggaaaatgtatattattataacactaaaatcggaaaaatcagcatagtggaaaatgggacagcaattataaaaatttgtttcataaacaaagacgaacttaacatagaaggaaatgaaacagagttactacgaaaagctataaaacaattggaagagttttttgaaggagagcggaattgttttgatttaccattagcgcctaagggtacggagttccaaagaaaagtatggagtgcgctacaagagattccttttggagaaacaaggagttatggtgaaattgctaaaatagtaggcaatgagaaagcggcgagagctgttggtttggctaataataaaaatccaattccaattataataccttgtcatagagtaattggtgctaatggtaaattggttggatatgctggtggccttaatataaaggaaaagcttcttaaaattgagaaggattataaaatataacttgaaaaataacatgatttaataatatataggtgagcgagtctttataaataataaactatttataaagatttgcttttttatttacgataaataaagaatgttgttttaagtaaagttgtagtgtgcaaataattaacatttaaattaattttgatagtttttaaaagtatttaagaagtgttttaaagataaaaataattattatataaggtattttaggcgagtgatgattaaaaatacttataagtattgaaaaaataactacatatgcttataattgcttatagggggtgattttatgattgagaaagaaggatatgaaaatcttaataaagataatatattttcatataaggagaggttgaaattaaatgttaatgaaaaaactaagattgttgaaaaggcaatgaaatttattcataacaataaaacgtatttttttgatgtttctactagtattgaatttctttcaagatctttagataaaaaagcgaccatatttactcattccatagataattttaatatactttcggaaaagaatggtattgtagtaaacttgattgatggaaaatttaacaagaaaaatcgctttttctatagaaggaattatgatgagtatttgagcggaatagagtttcaggcggcatttataggagctggagctataaaaggtaatggtatttattatgaaaatgaagaagatgcttatattaaaggggagattgtgaaaagagctaagaaggttattttacttgccgaacatcaaaagtatgaaaaagatgccttttataaaggattaaacctagatcgggcagatattattattgttgatccaatatcggtttcttcttttagtaacattatggaattgcataatattgaaattaatcctaaaagtctagtgattatataaagaaaacatattaatttaagtagtgttatttaggagaataaaattgagttttatttgcttataaatattcaatgccataagtaattataagtagtttgacgttttattataaatagttgggggatgaataaatgaaaaaaattagaatggtctgcttggatattgatggaaccttgttaaattcaaatcatgaagtaactgaaaaggtgaaaagcactataaataaagttgcaaataataagaaaatacctgtaattttagtctcagctagaatgccaaaaggaataaggtttcttcaagaagaacttggaatagaggaaccaattatatgctatagtggtgctttaatcttagataaagataatagtgtattggctagagaggcaattgatgtttctaattttgagaaaatatataagttaacaagtgaaaataacattcatatgagtttatataaggatgatgaatggtatatagaaaaattagattattgggctaaacaagaaagtgaaataactaacatcattcctaatattattgattttaataaattaatagaacaatggaaaagagaaggagtaggaccaagtaagattttatgtatgtctaatccaaaagaaataaacttcttaaaagaaaatatttatgataatgatttaaatatatatccttcaaagccaacatacttagaaattatgcctataaaggcatcaaaaacatctgcaattacctgtttacaaaagaaattcagtatagataaatcagaaataatagcaatgggagacaattataacgacattgatatgttagagtatgcaggagttggagtagcgatgggaaatgctccagaagatgtgaagaaacatgctgatgatgtaaccttaactaatgatgaagatggggtagcagaagcactgataaaatatgttattaacaagaaataaagaaaatgttttatggccgttttatttagaactttcataaaatgcttttttagagatgtataagcatagataataagtataaaaaaatttaagtttaactcatgttatttaatttacgtgaaatagaaatgaattacatatatttgtgtaatgtttatttataaacttaagcaaatgtatgtaatttatttcaatttcagcctttttatatttgaaatttattaattttttattcaaaaaatttattttatatctgtataatatgcatatcccataagtctactaatatttttagcgacattcataaattcctctttgtattttagtaaatcatccatagtattaaagagtgttacggatgagagactggttgcagcaataattttattggttctatcaaaaataggaacagctatgcatataacacccgtatcgtattcaatattgtctaatgcatataggttctttcttataacatgaatttcttctataagaacatttatatcagttattgtgttctctgcatattttatgaattctgtatcttttaataattctcttattttatcatcagaatattgagataatatcaatttaccagaagcagtacaataaataggcgctttttttcctatactagaagacattattatatttctactagtattttcggaagatactttatctacataaattatgttagtaaatgactcgtcaggaatacaaagatgtatgacttcatcaaacttattagcaaagtcatatatatgaggtctggcgacatttattaaatccatactatttgttatagaagaagataagttaagaagcttaattcctaattgatatttatcgttttctgcattttgcgtaacatattctttatattttaaagttgtaattattctatgtatggtactcttgcttaaacctaaattttttgacaattcagcaattccacatccttttggatattcggctaagcaatcaagtatatcaagagcacgttccaccgattgaactaagtttggattgcttaaatcctctgacatataaaatcctcctaaatagttttatctttatactacattgtaatgtttaattttaattttaacaaataaaaagttaaaaattttatttttataccagtatcattgacaattgtaagtgatgatattagaattaagataataaatgaaacggtgttccgcaatacggaacgatggcgtgcgttgaaaaaatttaataatacatgtaaggatggaaatatttatatggaaaggggagaatagataatggaaaacattttggatcagttttcaatggacttttttagattagatggaaaagtggcaatagttactggaggaaatacaggtcttggacaaggatatgcagttgcattagctaaggcaggagcagatttagttgtttctacccacggtgataattgggatgatacacgagaattgatagaaaaagaaggtagaaaagcagtgttcgtgaaagcagatttaacacaaaaagaaggaaggcaagatgtgattgattctgcgatgaaatcttatgggaaagtagatatattagtaaataacgctggaactataagaagaacacctcttcttgattataaagaagaggactggaacgcagttatggatattaatttaaatgctgtatatttcttaagccaagaagttgctaaaataatggttaaacaaggctctggtaaaataataaatatagcgtctatgttatcatttcagggtggaaagttcgtgcctccatatacagcaagtaaacatggagttgcaggtataacaaaggcatttgctaatgaattagcgagtaaaaatattcaaataaatgcgatagcacctggatacataaagacagcaaatactgaaccaataagggcagataaagaaagaaatgcagaaatacagggaagaataccagcagatagatgggcagaaccatctgacttaatgggagcggtagtgtttttagcaagcagagcatctgattatgttaatggtcatattctagcagttgatggaggatggttagtaagataatcagtattcaaaattatatataaatattgactaaaatttaaaaatggccttatcaaaagtatgaatatagaaatctatctccaacttatttggtaaggttaaaaacaaatatatagtgaaagtggtgtatttatttatggacgtaattactataggagatgcaatgattgcaatgtgccctcaagaaaagggaccaataatattttgtgacacattcaaaagaaaagtaggtggagcagaattaaatgttgcaatgggatgtgcaagattagggttaaaatctggatggataagtagattgggaaatgatgatttcggaaaatatatactaaagattgtaagaggtgaggggatagatacatcagaagtacaacttgttgatggatatccaacttcagtatattttagagaagttttatctgatggatcaagtagatcattttattatagagaaaaatctccaactagtacaatggatgcaaagaaattgaatgaagaatatataaaaaatgcaaaagttcttcatattacaggagtttttccttcaataactgaaaataatagagaagttatattagaagcagtaaaattagccaaaaagaataatcttataatatcatttgacccaaatattagattaaagatgtggactaaggaagaagcaaaaaactatatagaaaaacttttaccttatgttgatattcttttaataggtgatgaagaaatagagatattattgggagatacaaatatagaagaggcaataaaagttttccataacaaaggaatagaaaaagtgatagttaaaaaaggagccaagggagctatagggtcagatggtaaaaatatttatgatattgaagctattaagccaaaagctttagttgatacagtaggtgcaggcgatggatttgcagcaggatttttaacggccttattaaaaggtaagtcactagaagattgtgttagatttgcaaatgcagttggatcattagttgtaggtgtcgaaggcgataatgagggactaccttactatgatgatgttttagtacatttaggacaagcaaagaaaatagaacgttaagaaatatatatttgtatttaataaagtattttatgaatgatgtagattaattttaaataaaataaattaaagatgaggtgtaataaataatgtttgaaaaaatttacaatacattaaaagaagaaaaggcagtagctgttattagaactaaaacatatgaagaagcaaaagaaataagtatagcagcaatcgaaggtggaatgaaaattatagaggtaactatgagtgtgccaaatgcgccaaagttaataaaagaattgaaagaagaatataaaaatgcttgtgttggtgcaggaactgtgttaacaaaagatgctgtagatgcatgtatcgaaaataattctgattttattgtttctccttgtatagatgaagatgtaattgcttatgcaaatcaaagaaaagcattaataattccaggattaatgacaatgtcagagttaaataaggcttacaaattaggtttaagatttatcaaagtattcccaggtaatgttgttggaaaggcatttataggggcagcaaaatcaatattcccagatcttagcgttatgcctactggaggagtaaacaaagataatataagtgaatggatacaagcaggagcagattgtagcggtataggtagtgatttgaataaagtttataaaagcaacggtgttgcaggtgtaaaagaatattgcgcagatgttataagtaaagttaaaaatttataattttcagtaaagatttaaagcacttaattttattgattaagtgctttaaatctttttttattaatgattttctgagctattcttttagatatttataaaatagttatgttaaaaggcagagtgttttagaaagcgacagatactattaatattatttaaaatgtagggttaaataatatcaatttgcaatttatatttagaaatttatctattgaatagaagactaagtgtagtgactttatattaaaaaaatgatatattaataaaaaatgaaccgagtatgattaaaataatgagtagaaagaaggtattatacatgtatgaaatgaaggaagaatacaaaatcggaattgatcagattgatgagcaacacaaaaagctttttgaattggcagatcaagcttatacgctgttaaaagatgaatttgcaattgataagtatgataagataatacatattatggacgaactgaaggattatacaatttttcattttaaatcagaagaagaatatatgaaaagtataaactataaaagactctttactcaaaagattgagcatgataaatttattaaaagtcttgaagaaatagattataaaaatattgatgaaaaccaagatgaaagtttaataaaacttttgaattttttaaatgattggttaacagagcatatattaaaaaccgataagcttataggagaataatataattataataaaaacgtttaattttttattataattattttgcggcgagggtgagatatagaaatcttactctttttttattaaaaatttagaaatataaaaagtgctcaaatagatgttgcaaagtattgattaaagttatataataaaggaaataaaatatatatcttcagggcagggtgtaaatccctaccggcggtatagcccgcgagcttttaagaaagcagattcggtgtaactccgaggccgacagtatagtctggatgaaagaaggtaacctattaggaattgaaagttgatctattattacttgctgaatgtatgccctgatgtattttacatcagggctttttatttttttattaagtattgcgaatagttcaggagtaactaatgtactaagaatactttgacactaaattcctaataagctacaccaagaagataatcttttgggaggcaaagaatatgaatgaaaaaacaagtaaactaatcaaaatctctttattatcagcaattgcaattatacttatgtattttgattttccaataatacctgcgtttccatggcttaagatagatctaagtgatgtaccagcattgttgggtgcttttggatttggtcctgtagcaggggtgataatagaattaataaaaaatcttttggttccattaatcagaggaagtcaaacaggttttgttggagagacagcaaacttcttgtttggagcagcattaattttgccagcatcatttatttactatagaaataagaacaagaaaaatgcaatattaggaatgataataggtggaattgcaatggaggcaatgggaattgtgggtaacatatatttattattgccagcttatgggatgaagatgccagcggatatgttacagaattatgtttgggcattactagctttcaatggagtaaaggcggttatggtgtcggtattaacatatattctatacaaaaaagtatctgtttcaatttttaaggttgaaccaaactttggcagtccagaaaataagacaaaaattgtataattttaaaataatataagcagaaaaagctgtaacaaaataattcgaattttgttacagctttttattgtatattggttggtatataaatttaatgttatatataaacattaatattaaattgatttttaacatgattattaaataagctaaagatgattactcatttaatatcagataaaattttaatagcaactattcacataaagatgagtgctttctccttttaaattttataatttagatttaatttggcataatggttataataatatataaataattaacgttaaacagatagatatattatagtttttatatgtattaatatttattgttcaaaaggttataaaataaattcatataatagaaaattaaaattaattaataataattattgattaataatgaattatttggtattatatatatagaaaatatttaaagattaaagaagatatttaatgatcaagtgaatataaaaaaatgagattacaataatttatgatagtatgtgaaatgcaacaagatagatggctaaatgtatatcataaggaataacaagtaataatagagagaggtagtagttaaattattaactctgcaagaagtcacaaaaatgatataattatagaaacttttaaactaaagatcgttctaattagctcatcacaataaatgcagaagcgcttaattgatatatattttacaagatgataaattaacatagtaagatatgtatttattaatatttaattatcaaatctaagggaggtttttttatggaaaaatatatttgtacagtatgtggttatatttatgatgaggcagcaggtgatccagataatggagttgcaccaggaacaaaatttgaagatatcccagaggattgggtttgcccattatgtggagttccaaaatcagattttgaaaaagaacaatagtagatattgttttaatttaaatttgactatataattattttagaaaatttataaataagaataaaatatttaaaaacaatagatataaggggctatcaaaataattttgttatattttgaaagtcccttataatatatttagattaattatttaccacaaggtcctaaataataaaaaatgggagaatgcatagatatgtttacagaagagagactaaacgaaatattaaatattctaaatacatatggaaaagttaaagttaaggatttaagcaaaaagtttaatgtgacagaagattgtattagaaaagatttaaaacaattggagcatgcaggaaagctgaaaaggacgtatggaggtgcgattcaaataagggaatcatcgcagttgtatgacatttcagaaagagagaagatagatatttcaactaaaagcataatcgctaagaaagccttagaactaatacaagatagggaaactatatttttagatttatcaacaattaatattcttatagctaaatctattttaacaactcaaaaaagaataactgtagtaaccaatatgttggagatagcaaatattttagcaaaggcagccaataatattactgttgtagttgcatctggagttttaaataaatctcttaatggttttattggatcttcaactaatgattttattaaaaaatataaatttgataaatcttttataggaagttgtggaattgatgcctttgataaaagtataactacttttgaaattgaggatggaattactaaggccacaataatacaatcgagtaaaaagacatttttagttatggagaacaagaaattttttgtagatggtaattataaatttgcaatgattgatgatataaatgctataataacggatgaaaagcctaatcaaccaattatagatgtgttagaaagtaatgaaattgaattgatatagaatataagtaaatcaattattagaggtagttttttgctgcatataaattgatgataagtgtaaagagacaatttatgcaatttgaacataatgattgcatgaattgtctctttgatatgtttacctaagcacagaaatttgtaattgagatattactcctttaaccacattaaaatagcatcttccttgttatcttcatagtacccttttcgaattccctcttgtttaaagttatatttttcataaagggctttggcagcggcattactttttctaacttcgagagtatatgctacacacccttgagatttacaataagatagtaattcttctaggattttagaggctattccttgttttcgatagtttggatgtgttgctatgtttgttatatgagcctcatccaatactatccatgttccagcaaatcctacaactttattatcaactttagcaacaaaatatttagcaacaggattggttagttcctgcatataagaatttttgctccagcatatagaaaagctcaacgagcttatatctaaaatttcatctatatcttcttctttcattaaatttatagctatattcactataatctcatcctttgctcgtattctctttcagcctgagattttttgagataaaccggagcagaatttggatcgtcatattctccgttctttaatagtgcactgcctatttcacctaatgaagaggcacgaattaaattaaggtgattaggaggaaaatatgaatttggacaattatcaatcaaataatctttatatttatcaacaccatcgcctataaaaataactttttcatttttggatttaattatttctataagttcatcaatatccaatgctgaataatctaatagacattccaattttataggtaaatttgaagcattattgttactgcagcaagtatattctcctttatatagtgaagtataaacactatttcttaaagcatccattatagggcatattataccatcgaaattagatacgctaaatgcaagtgcatctaaactagaaacactaatgtaaggcttgttacttcccaagctaagaccttttattgttgccatgcctattctaagtccagtaaatgaaccgggacccttcgaaataacatagccatcaatatcatcaatacttaagttgttattgtttagcaactcttgaattatagacattagtattatagagtgttctttcttatcgtttaatgtaatttctccaagtagtttatcatctttcatcaaagcagcagttgccactttagaagatgaatctacggcaagaataatcatattttcaactcctttatataatcatatctttttccataagcatttagcgtgatttttctataatcttcgcctttgctgtaatctttctttatatctatatgaagtaaatcatttggtagaatttcttctatataatttgcccactctattattgatactgcatctgaaaatatataatcatcaaatccaattgcatatatttcatcaggatcacttactctataaacatcgaaatgattgagctttaatcgaccgctatcatattcgttcactatagtaaatgttggactagtaatattatcgttaatgcctaatcctttagctatgccctttgtaatatgagtcttacctacacctaaatcaccagttaagcagattatatcaccggcatttaataatttgcctaaatttattcctaatttagcagtatcatctacattataaatttcaaattccatgaagtgcctcctttaagtgagaattaattcttattaattagaattttatatcaataacttacatatagttattatgtatagaacctaataattgttaaatctaaaaactctcatctttttattttatctcaaaattgcataaaagcaaattaataatgtattaactaatttaattatataaaacaggaaataagcattcaaaaaaatgtaataaatttgtatatatttattttaaattagttggtataataagaataggtatatgctaaaatttaattaacagagtaattactgaggtaacatatgtaactcaatatatataaagtgaattattttatgtttaacctaataaatgttaattaataattaacttaagaaattaattacagtacatattaaaaagaaagttataaatgaagtcagttaaattttggaggtgacttgtctttgaagaaaattacctttgccatggtgataataaccatagcattgtcttttggtatgagttttttttcaaatcctttattagctaatactgagaataatagaactgaaagcagagataaatatctaaatataatgacagttaataaaccacaatattatatggttaaaaaaattataaaggaaaagaataatgcggagtatatgtttactaatgagaaagatattagtgaatttaaatatagtgaagatgttttaaataatatatccaatatggatttatttatatattctggcacatcttttgaaccatggagtgattcactaattagtgaattgaagaaaggaagccttgggataataaatttagctagaggcataaaattattaaattatgggcatgataatgacactaaagaaaatccttactattttgaaggtatagaagagtataaaatagcattatacaatgtaaaggcagctattcaagatagagaccctcaaaatagagattattatgaggaaaattataatgaagctatcaaaaattttgatactagcataaaggaatatagtgagaaaataaaatccttaagtgaatataaatttattacattaaataatgattttgattacttaactaagtctttaaatttaaacactattcagcttgataatcatgagttaagtgagttcataaaaattaataatttagatcctaaaaagataataataatagttgatggtgaaaaaggaacgaaattagatttgtcaggttataatactataaagttgtggaaatattatggagatatgtcttttgatgatttgattttatacaatataaaagaattatcaaaatgggctaaacccaatgaagtcgtaaattccagtaatgcaaaatagaattacttattttggagttatatatctttttattattagatgtgattatatactgcactaaagaatttgcaaattttgaatataaatataaagtattttatatttagtgtagttttattttcacgataattaattataaaaatatgttgctttctttatagatatgttatataatgattattgtcttaggggtatggctcaacggtagagtagtggtctccaaaaccattggttgtgggttcaaatcctactgcccctgccacaaaaatcgtagtacattgtactacgatttttttatataaaaaaatttgattacaacaacaaagaattaggatcataaggaaatccgtatttataatacttaattttccctattagagatatgaatttaaatcaatagatataaataatgatggtattaataaaaagtaaattaatataacttaattttgatttggagggattataaaatgttagaagtaacaaatacaaaaaaggcaccagcagcaattggaccatattctcaggcaataggatttggaaatatattatttacatcaggacaaataccgttggatccatcaactggtgaggttgtaggaagtaatataaaagagcaggcaactcaagtaatgaaaaatatatcagctatattagaagctaatgatattaattttgaaaatgtaattaagactacttgctttattgcaaatatgagtgattttgctagctttaatgaagtatatgctaagtattttgttagtaatccagcacgttcatgcgttgccgtaaaggagcttcctaaaggagtattatgcgaggttgaagtaatagctttcaaaaatgtatagtttatagatgaaatgctaaaataatattattgtaaataaaatagactatctcaaagatatcctcgtgataaggaagttctttgaaatagtctattttttaagctttcttaatttcagatactaattcatccataagctctttcactgttgtgatttttgttattctgcttgcattttcaccacagaatatgagaccttcatcaaggttaccctttactgcatttattaaagctttgcttatacaataaggtgtattagcagggttgcaaggtgttaaacaattataacaatgagttattttctctctctcagagctagttttctttacaaatgtattcttcatagctctacctggcattccaacgggactttttactatttgaatatcatctttgttacaattaacataggcatttttaaactcatccgaagcatcacattcttcagttgctacaaatctcgttgccatttgaacgccgctagcacctaattttaaatatttagcaatatcatatccatcaaaaacaccgccagcaactactactgggatttctttattatacttttcagcgtacttctttgtttcatttattatatctacaacagatttatcaaaatctaaattttcatcttctaactcttcaactttaaagcccaaatgaccgccggcttttggtccctcaattacaacaagatctggagctacattatcgtgcttatcccaaagtttcaaaattacttttgctgcttttaaagaagaaactattggtgcaatctttacagaggaattctttactattttaggtaacatagtaggaagtcctgcaccagagattattaaatcaactccagcttctattgcagtttttatatgatcttcataattattagttgctaccatagcattaatacctataatgccatttactgctttagctttagcaatagtaatatgtttttttaaagcccttaaattcgcctctaaagggttcttttcaaagtcatcttcattataaccaagttgtgcagcagagatgattccaattccaccagcattagcaacagcagcagctaaattagaagatgaaacaccaattcccatacccccttgaataataggaataggagcaactaaatttccaattttaagagaattaaaattcattttacatatatcctttcacgaaaaattcgacaataaaatattttgactatcaaagtattatattttattataaaataatatgagtagttaaacaagaagtatttaaaaaaactactatttagttaagtttgtttggtgcattggggtgttaagattattataataatttattgatttgaatgattactaaaaattaaaataataaaattgttgacataaatgataaacacatgatacaatacttaatgtcttaggggtatggctcaacggtagagtagtggtctccaaaaccattggttgtgggttcaaatcctactgcccctgccacaaaggtcgtagtacgttgtactacggcttttttatgtacaaaaatgtatggcttataaaaaaagtatattttagagttacagaaatgcatctgattggtttgtatatccgtgtaaataattagctaaaaataagtaaaaagagaataatttagtataaaatgtagaaaataacttgacctttcccagaaaaagtatataattttattaatataatgaactatatgtaaacataaataattatgtatttataaaaactattttgtgtcttgtgaatgagctattataaaatacattcaatatttgaatattgaagacatattatggtaataatccattgtgaggtggaatacgatatgaataaattagttttgctaaacgaagttagaaaaaaaggaatagagaataaaaatagattggcaaaatcaactaataatactattaatgaaaaagaaagcaataagtcctatatatcttttagagagaagtttaattgcttcaaagaagatgatgaagctaataactcgaaaataagatataatgaggaattcaataagaatggtggtataaagaacctaaataaaattattgagagaatttttttgttaaataatacaacaataattgagcttgtaaattcattatataatgacgatttaaatatggatgcgagaatgaaatataataagattaaaaaaaatatagatataaatgaagatattaagttagaagattcaaattatgatttgaagatactagcagaagatgagtataggaagtttgaatacagggtacagtttcacgttaacgatgctgaaaatatagcaataatgataactaaggtaaatttatcgaataatcacaatgtaataagccttaatgcaaaaaagaggaaaagtgtaaataaaagtgaatatgctttgaagcataagtattctaaatccatgataatattgaattccaatattgaagttcctgatgtgtatccaattaaatcagaagctaaggaaaaaaatctagattatacaattaatataatcaaaggatggaaatatgattttaagcaattaagcgaaaaaaatatgtatttactatttccattaaaagcattagatattagaaaaagattattaaatatgaaagaagacttaatgtcaaaggatttaattaaagatgaagtgtatagattctttaaggatatgaataagtatttacaaagaggcaaggctgatgatttaattacagataaagatattattgaatttaattcaataacaattgatttgctaaattcttttattaaagataagagtgatatatttactgatataaaaagagatatagaaacaacatttaaagagatagttgtatagaataaattgaatttagtagtgcaatagtaaaatcgataaatttatattgagtagagatttctattttaatatttaatagaggataaatattgaagaatgtccttatattaatgagaataataaataatcgtaaggttaaaatactattatcggtagataaaatttttagagttttgtttactgattctatcaattagccgaggaggggatcgttatgtcaaacaacaataataggacattagttccagaagcaagacgtggcttggaaaaattcaaggacgaagtggctcaagaactaggaataccatttaaagaatacaatggtaacttgagttctagacaatgtggttcagtaggcggagaaatggtaaaaagaatggtagaagaatatgaacatagaatctaatgaaattttataatttaatattgtttctatgtatgttaggataatctaatcatattctaaaaaacaggagatgtattatacaaaggtataatacatctcctgttttttgagcaaatattatatagaggtttgaattataaacgtgcataataatcattttggactgttcgcaaatttcgtggtaaaattagaacaaaagttcgttatataaaaaagtttaggtgtgatagtatgagaaaaattaagattttacatatagcagatatacattttgatactccttttagtggaatgacaccaaagctagcactaaagagtaaagaagaattaaaacaagtttttgagaacataatgctaataactttaaatgaagaaatagatattttactaatagcaggagatgtatttgataatttatctgtaaagaaaactacacttcattttataaaaagctgttttgaaaatattagcaaggtaaaagtttttataagtcctggaaatcatgatccttttaatgaaaaatctttctatagcattgtagattggccaagtaatgttcatatttttaaaggaagtgttgaaaaagtaatattagaggatttaaagactgttgtttggggagctgggtttaataccacacatgtcagtaaatccttgttaaaagatgttgaaagaatcaacggatataacaacataatggttatacatggagaagtttctagtgtaaaagaaggaaataattacaatccaattatggaagaagatataattaaaagcgatttggattatatagcactaggacatagacataagttttcggaagttaagaagataggtaacacatattacagttatagcggatgccctcaaggaagggggtttgatgagcttgaagataaaggaatagtattattagagattaagaatagatttgtagaaagccggtttattagaacatcagtaagaaattactatgagaagggaataaatattgacgggtgctttggatataacgaagtaaaaaatagaattatatcagaaatacctaaggatgatagaaagaataatttttataagattattttaaaagggcaaatatctgatgaattttcattaagtgaagaattacttgaagaactacttaaagatgaattctattttgtgaagattattgacaaaagtgaaattaagttagatataaccgaattgataaaagggtactcattaaaaagcatatttgcaaaaaaaatatatgaagagctacagaatgttacaacggaggaagatagagaaattatttctttggctttaaagataggaattcaaagcatctcaggtgaagaggtaagaattaatgagatgtaaattgattaaagagagatttataaattatagaattaatacattcgaaaatagtatcgaaagaaattgtattcaagtaaattttatgaaagaggtgaaagcttttgatagttaaaaaaataaatataaaagcttttgcagggattaaagataaaagcctagatttaagcagaggattcaatttaatttatggaaaaaacgaaaagggaaaaagttcaattgagaattttatcaagatatggctgtatgggattgaaaattctagaagtaaactaaacgatagaaaaagatacatgcctctatctggagagaatatttctggagaattaataatagaacatgaaggaaaaagctacattataaaaagaagatttggtataacaaaaaaagaagatgaatgcgaaatcttagatgaaataacgggagagagcttgcaaatagaatataaaaatgagccgggaaggtatttcttcgatataaatttatctacttttataaagacgttatttataggacaattaggagtagttatatccaaagataaagaagaagaaataatggagaagctaaccaatgtttacaatgttggagatgaaaatacttctgtaaaaaaagtaattgagaaattagaaaagaagaagaagcaattgctaggaataagaaaaggtggagagattgatttattaaaagagaaaaataattcactaaaaacagagttatgggaagcatataaattagctgaagaaaacgtgcaaaatgaggaaaacttattaaggaagaaagatgttaaaagcaacataaaagaacaaattcaaaagctagatttatataaaaagtacattaagaagataaaacttcaaaaagactacaaagaaataagtagctatttagttaaaggggagcagcttaaaagaaaacaggatgcaataatcgaagaacttaaaaagggtgaggaatatataacagctgaatatttggatgaaattaatgaaaggtgtgctagatatctaagtttattagacgtaaaacaagaaaagttaaataaactttataaatcagaagaagaattaagagtaaaaaacgaaaaaatgataaattataaagttttttcttcgatgggaagtaatataaaagaaaaaatatatacattaaaagttgaccagaggaatttagaagaaaaacttaatgatatcataaatataaaaaattcaatagctggattcaagatgaatataagcaagcaggcttctagcattagtaacttagattttataaaaaataatagagaagaaatagagagattacttaattcttataaagaaggattaaaggaattaaaatataaaatggagaatcaggattatagtaagtcggaaggagacttaaatagcttaaataaaaaaataaattgtatttattttattggagcaatttgcatttctgcttttatatacagtatgttgaagcaaataattcccattatgattatatttatacctatatttattataataggaatagtatatttcaaatattccttattaattaaaagttcagagatttttaggaaaaataatatatcaattgatgagctaaaagaaagaatagaagaatatgaaaaaagattagatgtttatataaacaaaactaattcagtatcttatgaagattttattagtaagataaatcaatatgataagtatatagattataaagataatatgattttattaataaaaaataaggaagaggagattaacagatacgatattactaaattaaaatcaaattataatagaaataaaggtgtgatagcatctttgtataatgttttaggatgcaagtctttagatgaggtgctagaacaattggaattctatgaaaaacaaaaagaagaaatacttataaaggaatacgagattaatacaattaataaggatatagaaaatataaatgaacaattagctgataaagatgatgagataagaaaaaaaactcatgtacttggattagaaaatatagaaatagtagatatgcatgttaagttgagagagtataaagaaaaaataaataaaatgaatgaaattaaaagtgcattgaaaagtgtagaggaaacatataaggttttaataaaagatagaaatatagatgaaataaaggaagaaatgaaacaaattattagtcaggacataaactattcttatgaatctgaagaagaaatagactcagagattagagcgaagtctaatgaattgttgaaaatcgagaaggagataaaggatttagaacatcttatagaaaaaaggtatttaggtaaaagggaaatttcagagatagaagaagaaatattaatgaatgaagaaaaaactaaaaagttggagaaagaatttaaagcattagagttagctagtaatttgattcaagaagcatttgatgagataaaaaagaatattggaccagatatgaataagaaaattataaagaaatttaatttcttaacaaatgatgattacgaagaagctaagatatcagaagactataagctaaagattagaaataaaggaatgctattcgaaggggaaatactaagcaatggtgctaaggatcaactgtatttagcattaaggttatcatttataaatatgttgtttaaaaataaaagaatcccaatatttttagatgatgctcttgtccaatatgatgatgagagaagagagcgggcactaaatcttcttatggatgaaaattttgagcaagtaattttctttacatgtcaaaaaatagaaaagattattcttgatagaaataagtatgattataatttaattaatttgaattgataatactatcctaaattaatatttaactaatcttgacatatttaaactttaacagtaatattataaacagagttgcaaatgcaaatcagatgcaaactggaggtataatatgaagaagaaaataatttcgggagcgctagcggtattagtaagttttatgctaatcggatgtggagctaatgcaaatactggaatacaaaacaaaactgaagataaattaaaaattgcagtttcaatatatccattaaaagaattcgcagagaagatagctggtgataaagccgatgttatatgtctagttcctgataatatggagccacatgattatgagcctaaaaccaaagactttcaggaattaacaaagagtaatgcgtttatttataatggcttaggcatggaagaatgggtaggtcaagtaaatgaagctattaagaatactaatgtaattgttgtagattcaagtactggtatagaaaccaggcaagagggggatgcggttgatccacatgcttggctaagtttaaaaaatgctgaaatccagtcaagtaatataaaagatacactagtaaagttagatgagaaaaataaggattattatgaagaaaactacaataaatttaaagaggaattagagagtttatatagtgaatataaacccaaatttgatacattaagtaagaaaaatttcataacaggtcacgctgcatttggatatttatgcagagacttcggattaactcaaaaatcagtagaaaatttatttgcagagggtgagccaactcctaagcaattaaaagacttagtaagtttttgtaaagataataatataaagactgttttttcagagtcgttagcgagccctaaagtttcggaaactttagcaaaagaagttcaagctgatgtagttccaatacttacattagaatcaaaagaagatgacaaaaattatatagaagctatgagatacaatttggatgagatatacaagtgcttatctaaagaatagactagattaactttaataaagattgaggattattttcaaggttatattggaaataatccttttaattttaatccttggagttaataaaatcacatattagatagacgtctctgacttaaataaaaaaattatcttagtgttttaataatatctataagtttaatgaaaaaataatttaaacaaaggaatataaatcgaatttattatggtaatattatacttatggaatatgtattttatatatgaattactcactatatacagctaaaatggatatgaggtaataataaaatagattgcacaagataacaaggtagattaaaatatcctgaattaaaaataagatatcttaatgtgctttattttatttgtgatatagaattggaacaatagtttaatttatattaattatttgagttttgtttaaattacgaagtttagtttatagtcaacaaaaagattgattataaaaataaaattattatgttaggaggaattatgagtttagcagaagaattttataaagagaacatacaacgatgtttaagacaaacaaaagacctgaactataaggtgaaaattattggatggagcaggttgtttgtagtgattttaggggtattaactgattatattttatatagtcagaataaattaaatctaatattgatctcaactatattttttattggtatctttattgttttgatattttatcacaataatataattcaatacagagaaaagataaatacgataatgaaaattaatgagaagggaataaaaagattaagtggcaattttacgagtttcgaggattctggttcagagtatttggactataagcatccatttatagatgatttggacgtatttggcaataactcgatttttcaatatattaatgatacagtaactaaaggaggaagagaagaactagtaaaattattaaaaaatgaagggaatttgaataagcttgatattgctgaaagacaagaagctgtaaaggaattgagtagtaaagctgtctggaggcaaaatttagttcttgagggcagtttgaaaaaatcaaaagatatagacttagataacttaattaattggagtggagggacagaatcatcaagtccgctgagaattgttattgcatgtacttttattttagtaacaattttctcgatatatttagcaatggtaaaggtaataccacaatcatttctacttttaaatcttatggtgaactttatcgttgttaaagtgttatctaaaagcatgggtacagagattaaattatttgaatccataaaaaatagcatatatgggtatagtaaaattttatttctaatagaagaagaaaattttgattcacaatatttaaagaatttacaaggaaagttgaaaagtgataaattaagttgtaaggaagagatgaaagctttttctaatatcttggattggataggaaatagttcatataatgcatattatctgttatttaatatactattattttctgatgtattcctattaagaagtttagaaaaatggagagaaaagaatgggaataaacttaaaggttggttagaagtaatgcataaaatagatgcattagttagtgtatgtaatttgccatttgaaaatgaaaattggacgtatcctgttattttagataaaaatgaaataactgcagtgaatataggtcatcctttattaggagaaaaagcagttgaaaatacatttttgatgacttgtaatcaaaaggtttctttaatcacgggttccaatatgtctggaaaaagtacatttttaagaacacttggtactaatctggttttaagttacatcggagcaccagtgcatgcggataaattttcttgtggaattatgaagatatacacttgcatgagaacaaaagataatttagaagagaatatttcgtcattttatgcagaaattttaagaataaaaatattaatagaggcatgtaaaagaggagaaagtgtattttttctactagacgaaatatttaagggaactaattcaagagataggcatactggtgcatctgtattgattaaacaattaattaaatacggaggggttgggcttgtttctactcatgactttgaattatgtgatttagaaaatgaaagtgaagagataataaattataattttagagaattttatgaaaataataaaatcaaatttgactatattcttagagaaggaagaagtacaacacaaaatgcaattcatttaatgaagcttgcagggatagaagtataaataattgagtttaaagaattaaaaattagcattagaaaggattaagcatggggtacattattattgacttagaatttaataatttaaaaaatataactaattatcaaaaagatttttttgaaaaatatggcgagtttgattcaataagtttggaaaatgaaattatagaaataggtgcagtaaaagtagataaatatatgaaacctataaaagaaattagggaatatattaagcctaaaatatttccggtaattaatccaatagtaacagaaatcactaaaatagatatggatatacttaatgaaaaaggagtatcttttgaagaagctataagtaaattaaaggatatgtttgaagatggagatgttttatgttcatgggcaaaggatgacgttgcagaattaattattaacgcccatcattataattataatgatttaagatggttaaatgaatatctcgatattcaagaatatgttactaaaattttagctcataaaaaagcattggggcttaagtcagctttagatgaattgaaaattaaagtagatgatacaaaattacatgatgctttaaatgatgcaaaatataccgtagaggtatttagaagagtatataattctagagtgataaaaaattatatagttaaagatatatataatatgcctgccatacaggtatcagatcttgagagtataaaaataaaagaagaaaaattaatgctaaagtgtcctaagtgtggaaaaaaaattgatttacaaactcctataaagcttttaaattggagatttgcagctgtaggcacttgtccgaaatgtaagtgcaatgtcttatgcgaagttctggttaaaaagactcttcaaggagagaatggatataacgaagttaatagtgtattgaaagatgaagcgtacttaaattatatctataagttagagaatagtgagaaaaaaaggtgatttcagtatatattcagaaataagtaagaatttagttaaagaaatttaatccgagatatgataaaatagttttgtgaagaagaacaaaacgaatacattgaatgaaaggattttatttatgaatatagccttttttcttacacccaaaaatgaagttatatgtgaaaatcaagatgcaactatgaaacaagttatggagaaaatggaatgctacggatatacagctattcctattatagatagagaaggaaaatatgttggaacgctaacagaaggagatttattgtggaagctaaaaaatacacataatttgaattttaaaaacatagaatctgttaaagttaaagacatttatagaaaaacaactcataggtctgtttctataacttcaaatatagaaagcttaatatcgttagctgtaagtcaaaattttgtgcctgtaacagatgatgatggtacttttatagggataataaaaagaagtgatataataaattattgtttcaatgagatggaaaagagaaaagaattagaaatacaacaattttcaatgtatgatgaaggttaaagtattatagatatacgaatcatattcattttgaaaatttaaacttatgagtaactagtaaaaatggagatacgtatctttatcataaagatacgtatctccattttattctgagaaagatttgcttttataaatcaattttgaactataacttctatattattagataatagatttttaatagtactactctgcattttgataagtttctactacaaaatcaaattcgttgggatcagttatctctccgtaactatcttcttttattccagggtaatagtatagtactagcttatcattagagttgttgaaattttctagaagaatatacaaattatctaaagtacagtcttcaacgacagctaaaacattatattttgaagagataccggtatcgttgttagtaagttctagcataaaattatcaaattttcttacattgactctttctttatcacaggagcaaattagagaaccgcttctacagcttgaacattttttgaaattacaatcaaatgcacaactcaagcattcacaatgagagcatttttctaactgtttaaagttttctctatttttagctttaaaatcttgaagtaagtttatgctaggactagatttaaacattgaaaataaggattttttcttgcaatcagcttcagcagaatctaaaagcttcatatagtccttaagaataggtgatttagagaaatattttcttatctttgaatctctttctgaaataaatggggatatttcacttatagcataagttatatctgtataaattttgccccaataccttcgttcttcgttaataaaatttagatccttatcattatccatgttttatcacctaattagatttatattttgctaattcaagatccaaatcaacttcatctaatttcttaaattcgctatcaaaatcatctaggtctcttaattcacctaaaccttgagcaagagattctttacgttgaatttttctttctatactatcaatttgtattgagttatttttagtttgaacattagcaagaacttcattaactttttgagaagcctcagcatttgcaaatcttgcagctgcctcatctctgtaactcctagtttttgttatttcttcttctaaagcacgtaagtttgcctttaaagtatctgcttgtattttagcattatcatagcttgcttgtagagaagcagcctttttatctgtttcaacttttttagctaatgctcttttagctaattcttcatttcctttgcttagtgctaatctaactttttgatcataatcttcagattcctttttagcagaatctagttttttctcaatttcatgaacattacctaaaatttgagctgaacttaattttgctttattgaattgttcatccatatctcttagtttttggtctaataattcaactggattttccatttcatctaatgagttgtttacttttgccttaatcatatttgacatccttgaaaaaattcccatgcctatacctccaaataatttttattttcttttattatttaaatatttttttattaatataatagctagtacgaatactccagctaaaactaaggtgttaattaatgaacttgctggtgaaccaaaataaaatggtctataaaagtatccaccaccaaagaatggccagaatgaatgtctgttggaaccactattatatgtttgagtattagtatttttattatcatttgtattagaagaagttgaagggtcagtggttctacttttatcagttgtagaataagaaccgctactaaatccttgtgatccaccactacttgaagatgaagaagaattctttgaatttgagtttgaagaatcactattcgaaaaattaccagatttaaatccttcaccactctttgaactacttgaatcaccacttgtgtttgttgaggatttactagaagaacttgatccactaaaagatcccgaactaaatccattacttgattttgaactgccagaactaaatttgctgccgctggagcttgatcgactgctactaccagttgatttagcaaaggcgactgtagtattgttagatgtatttatacctataaatgacatagcatctaaagataaattagaaaatataaatatgaatgttaaaaatatagttaaaacatatttttttttaatcttacgaatagtgatcaccccttaaaagattatgtacttattatataaaaaagattccttatacacaatatggaaaagcgatgaaaaaagactaaaaaggatgattataattgtatatcgtaataaaggttattatctctctcttataatagttattttatatctttttaaatggtatttgatactgtataatgaaattgcaaataattttgggaataattagattaaaacaatatggatttttatattaagataatatgaggattaaatttaaaatgattatattataattatatttgtagcacagtaaaccgtacttgtgtaaaagattctattagactattattgtaagtaagaaaaattataatgaggagtgaattatactatgtccaatgaagaattagaaagcaatatgagcgaacttttaaatcaatatgatgtaaaaagactaaatagaggagatgtattaaaaggtaaggttatagatgtaaacgataaggaggtttcggttaatatagattatgctttcgatggattaatagctaaagaagaggtatctatagatgacagggatccgatggaagtagtcagtaaagatgatgaaatttatgtttatgtcatatctcccaatgatggtgaggggtatgttgaactttctttaataaaagctttagaaataaaggatagagaagagttaagtgaatgtttcaaagaaaaaaagaatattaaagtacatgtgaaagaagaaactaagggtggagtaattgcatactatggtaacgtaagagtgtttattccaggttctcttgcaagcagagaaagaattgagcttagtagtttagtaggaagagatttagatgttagaattactgaattagactttaagaataaaaaagttatagcatcaagaagaattattgaagaagaagaatataataaaaataagaaaaatatatgggataatttaaaagagggagagaaaagaaacggagttgttaagaaaatagttaagtttggagcttttgttgatattggaggagtagaaggattaattcacctttcagatttatcatgggaaagagtaaataagccggaagatatagttaaagagggagataatgtagaagtttttataggcaatgtagatagaaaaaatgaaagactttcattaatattaaaagatgtaactaaagagccatggacagttcatggtaaagacattaatgaaggcgatatatttgaaggaaaggttatacgtcttactacatttggtgcgtttgttgagttatttgatggcatagaaggcttagttcatataacagagattacagacgaacatattgcaaagccttcagatgtattagaagcgaatcaaaaagtaaaagttaaggtgctaagtgttaatagggaagaaaaaagaatagcattgagtataaaggaagctgtagaaactaataaagaatatcttgattacattgacaacagtgatgaaagtggaacttccttgggagacttacttaaagggttcaaatttgagtagattaacagaagtttaaatatgaaaaacaagtatggataataatccatacttgttttattttgaatgttttgattaaatcttttctatttttaacatattagttccgccagtttgagttgttggcattcctgcagcaactattatatcgtctcctggttgtgtgaaatttagactaaatactgtgtttttagcttctgttaatatttcatctgttgagttaaacattttacaaggcattgggaagattccaaagtttaagcttaatccttttcttacttgttcgtaaggtgttatagctatgattggagcctttgatctgtatcttgaaagtagtcttgcagtagcaccgctctttgttgctgccactatagcttttgcatgtaagatgttagctgttctacatgctgaataacttattgcagctgcgtagtcagtaagtgatggttctctaagtcttgcagttaagtgattataatctaagtattcttcagcttcttgagcaatttttgacattgtctttgctgcttctatagggaaacaaccagaagcactttctccacttaacatgattgcatcagttccatcaaaaatagcgttacaaatatcactagcttcagctctagttggaagtgaatttctaatcattgaatcaagcatttgagttgcagttataacaactttaccagcttcattacattttctaattatcattttttgtattataggcactttttgaattggaatttcaacacccatatctcctctggcaaccattacagcgtcagttacttcgatgatagaatctatattatctacaccttcttggttttcgattttagctattacttttatatgttccccatggttttcttttagaactttctttacatctaagatatcactggcttttcttatgaaagatgcagcaataaaatcaacgcccattttgcatccgaattttatatcttctatatctttttctgtaattgatggtaatttaataactacattaggtacatttacgcccttatgatttttaatttcaccacctacaacaacttttgtatgaattgttttgccttcaacaccagtaactttaaattttagaaggccatcatcaacaagaatttttccgccaacttttatatcttgataaagtacatcatatgagattgagcatcttttctcatcaccaagaatttcttcaccacatatgaaatcgaaatcgtcaccgtcattaagagttacaccatcgtttacaaagttatgagttctgatttttggacctttaatatcaagaactatagctgttgcagaattcatttctttacttaggcgttggattagttcgattttttctttgtgtgtttcatgtgtaccatgagaaaagtttaatcttgcagcgctcatcccaatttcaatgaactttcttaaagtctcctcattatcgcttgctggaccaatagtaaaaatcatttttgttttttgcatataaacacctcacattaaaattttgtatatatattatagtgtgtgaaataattaatcataaaataataaaaatatacataatatagcaatattttatgataaactaagaaaagatatgtataatcatattctatcatataattgatgaaaggaagagagtagaatgaaaaatttagagaatattacggggaaaagaattttttatcattttaatgaaataagtaagataccaagaggttctggaaatgagaagcaaataagtgattatttattgagctttggaaagagtttaggattagaatgtattcaagatgatgccctaaatgttattattaaaaaacctgcatcaaaagggtatgagaaagctccaacagttataatacaaggtcatatggatatggtgtgtgagaaaaataacgataaaattcatgattttgaaaaagatccaataagtttagtggtcaaagatgattatatatatgcggataatacaactcttggaggagatgatggaattgctgttgcttatgcgatggcaatattagaggacacatcgatagaacatcctgctatagaggtattaataacaacagatgaagaaacaggaatgactggagctaaagctgtacaatcaaaagatttagatggaaaaatcgttttgaatttagattcagaagaagaaggaaaactttgggtaagctgtgctggtggaattagaactgaatctactttgcctattgaatggacaaataaaaaagaaaatacaaaagaatatgtgattgaagttaaaggattagctggaggacattcaggagctgaaattcatttagaaagaggaaatgcaaataaattaatggcaagagtattaagggaaatcttaaataaggtatcttttaatttagtttcattaaaaggtggagcaaaagataatgcaataccaagagaagctatggcggttatttcaattgatcaatcaaaggaaaaagaactgattgaagctaaaacaaagatagatagtaatatttctaaagaattgagcacaaaagatccaggacttaagataacattatctgaaagtaaagataaaatagaaaaagtattttcagatgatactacaactaaagcaattagtttatcatatttgtatccaaatggtgtaaacacaatgagttctgaaatagaaggattagtggaaagttcatcaaatcttggagtggtaacaaccaatgaaagtgatataaaatatcatagtgctgttagaagttctgtgttttcattgaaagaagaaatagttgaaagaaataaatgtttaactgaaattatgggaggtacatttgagtctgccgcaggatatccagaatggccatataaaagtgattcaaaaataagggatatatgcaaagatgtataccttagaatgtatggaaaagaagcagaagttgtagctatccacgctggattagaatgtgggatacttaaggaaagacttggagatttagatatgattagttttgggcctaatatcattgatatacacactccaaatgaacatttaagtatatcttctgcttgtagatgctttgaatatttagtagaagttcttaaggaaattagaaattagtataaaaaattaattagaacagtaagttaaccagaaaatttattggataacttactgtttttttttattattctcaggattttgagttttaagtttatttataaaaaagataatgagtaagaaataacaaaatgtaaaacaaaagtcagaaaattataaatttacagtaaatgaccattattgatagcaatattgaggaaattagagatatttcggtataaataagaatataaaagtataaaaagtttgacctttacctagcttatcactatactagaaacatgttttaaaatttgcagtaaggtgtaaacgataactaaagtgccttttagggtaatatagattaggtatggagaggaatttaagatgaaaattaaaaataataggcttatgaaatgtgtaattacaacttttattttttcgggagtttttcttattaatatgcaacatgccaaagctgatactacattaacacataatagaggaattacaattaagactagtgaacttaaaacagctaaagtgataaaagcaccatcagattcagaaacagtatcaaatggtgaagattcagtatcaagaggagcaattagtaagggaaatgaagtcgtaaattatgcatataagtttttaggaaagccgtatgtttatggagcggttggtccaaatgcttttgattgttcaggattaacacaatatgtttataataaatttggtgtagatatatcaagaactacatatacacaagtaaatgtagggactaaagtagataaaagtaatttaagagctggtgatttagttttttttaatacagaaggttcaattagccatgtgggcatttatattgggaacggagaatttatacacgcaccaagatctggaaaaccagtaatggtaagttcattgtgtgatgggtactattcagaaagatatgctactgcaagaagaattttttgctaatggatgtagttaacttaagatactaaatgtaaacataattatagttaaaaatgatatataagtatgcttaggaatgtatgaatgtttctttcaatagctttaatattgttaatatataagtttagatttttaaaatattccctatataatattttttatttaacataattcatatatgtgtaacttacagaataaatattaatatataagaaatctgaaaaaatagcaggtcaaatatatataatattattctgttttataatgttttctataagttttgataacatataaaacttaactttttgacacgctatttttagaatgttcaaaaggggggagactatgagatacacaagatatgaatataaaaaatcaggcaggatgaaatttttatgtagtgttgtcgttatcgttgggatatctatagttggaggagtgcttattagcaatgttgtctttgatgggaagagtgtacaaaacgtaggtataaatagctcaaaggcttcaactcaaggtgactataatggtgcaataaaaaatatcatcgcactgcaatgtggctattattcaaaagaggagaatgcaaaagagtcactatctgcaatatcaaaatactgtcagccatttatagtagaagatgatgggaaatatagagttttagcaggaatatacaatgaggaagatggcttaaaaaagatagaagaattcaagtccaataatattgatgtcgctaaaattagtttaggtgcttctagtgatgacttggaaaataaaaagctcatagaaattatgaatggatttttgacaattgtgaataagttacaagataatcaggtgaaaagtataaaaacagcagaatttaaagcctggacggatggaattgtaaatgaaggaagcacagtaaaatcaaataagataagccaattatatgattatataaaaaatctgcctgatgaaatggataaaacgaacagtagtaatgatatgcaggagttatataaacttattaaaaactgaaagatttagttaataattattacaacaaaattacatttatataaaaaaacttataacttaatataacacacttgtttaagaacatcttaaatgataaactataaggtgtagaaatggtagaatatcatttctacacctttaaaatttaatagtttttggttaaaaaattaacatgtctacaatatatattatttgtcaatgatatataataaggtacattcaaaaaatgggagatcatcatgctcgcctattatttttcatgtgccaaaattctttattttaggatgtgaatatatgaaagtaatattagcttctgcttcagaaagacgacaagaactcttaagtagattaattaagacttttgatgttattgtcagcaattttgatgagagtaaagttatttttgaaggctctatagatagatatgttaaagacatagctttaggaaaggcaatgaatattaagaataagctagatgaggatgcgattataatttcagctgatactgtagtcaccatagacaatatgatactaggaaaaccaagagatgaagaagatgcttttaatattataaaatcacttcaaggtagaaagcatttggtttattctggcgttgttgtgattaatacagctaaaaatttaacgattcaagagagtttatctactgaagttactttttctgaaataagcgacgatgaaatattagaatacataaaaactggtgagcctttagataaagctggcgcttatggaatccaggggataggtggaatatttgttgaagagataagaggatgttattacaacgttgttggactgccactgaataagctaaagtttatgcttaaagagatacaataattatattttagggatagaggggaaatcatatatttggaggtaatatattatatggaaagtagccttaaaatcaaagacataccacaaaatgaacgacctaaagagaaattattaacttatggagcagaatctttaagtaattcagaattattagcaataataattaggactggaacacaaggagagaatgttcttcaattgtgcagcaggcttttatctgagctagaagggctaaatggtattttagatgcaagttttgatgatataatatctataaaaggtattaaacaaggaaaagcttcacaaattttagctttagctgagctttttaagagatttagaacattgaaagcaataaataatgacatcaaaataacttcaccaaaagacctagcaagtcttctcatgggagaaatgaacgaattaaatcaagaagtattaaaagttgtcttattaaataccaagaatatagttgttggtattaaagatgtttttaagggtagtttaaatacgtcggttgtgcatccgagagaaatttttaagcaagctataagtaagaatagcgcatcgataattatatgtcataatcatccatcaggcgatccaacgcctagcagagaagacataaatataacactaagaattaaagaatgtggaaatattataggaattcaattagtagaccatattataataggaaataataaatttgttagcctcaaagaaagaggactaatatagaattggaaggggaaaaataaatgggattttttggatcaggaaaagatatggggatagatttgggaactgcaaacaccctagtatttgtaaaaggtaaaggaatagttttaagagaaccatctgttgttgcaatgaacactatgactaaaaagacattagcggttggatcagaagctaagcttatgataggtagaacccctggaaatatagtagctataaggccattaaaagatggagtaattgcagattttgatacagctcaaacaatgatgaaaagtctaatagaaaaagtatcaactaagaatgcatttaaaaatccaagaataatagtttgttatccatcaggagttacagaagttgagaaaagagctatcgaagaagctacaaaactttcaggagctagagatgttattttaatggaagaaccaatggcagcagcaatcggagcagggcttccagtaagtgaaccaacaggaagtatgatagttgatattggtggtggaacaacagaagttgctattatttcattaggcggtatagtaactagtaagtcacttagaatagctggtgatgagttagatcaatcaataatatcttatattaaaaaagaatttaacttaatggttggagaaagaacagctgaacaagttaaaatggaaataggttcagcttataggacttcagatgaagaaacagtcatggagattaaaggaagagatatgattactggccttccaaagattgttgaaatttcagaaactcaagttagagaagctttaaaagaaccagtatatgctattatagaatcaattaagacaacattggaaaagactccaccagaactttcagcagatattatggaaaaaggtataatgttagcaggtggcggggcatatctaaaaggattagatatacttataaataaagaaacaaacatgcccgtacatattgcggaggcacctcttgattgcgtagtacttggagcagggaaggcactagaagattttgataaaattagtagagatcaaagaggttaaatatgaagcttcttaagaataaactggcagtaactattatagtactgtcagttagctttttagggttaatagtttatacagttagaaaggataatagaagtattattgaaagtggtgccggtagtactttaaatccagtgcaaagtctcttatattctggaactagtaggattaaagaaaccttagattttttcttgaatttttcagaagtaaaagcgcaaaataaagaattaattaaagaaaatcaagaacttgaaaatgagttagccagttattcagatttaaaagaagaaaatgatagattaagacaagtgttgaattttcaggaagaaagaaacaattataactatgtagcatgtgatattataggatatagtggtggaaactttttagatggttatgtggtaaataaaggaaaaaatgacaatatacaaaagggtatgattgttatagcagctcaaggtttagtgggacaagtaaccagtgttggaagtaattggtgcatagttcaatctctgattaatgaaaatatagcagtaagtgttatggatcaaagtaccagagatgctacaggttatataaaaggtttcaaagatagtaagggagaaaacttagctaaggtatatgatcttccgatgaattcagatgttaaggaaggcgatgtaataatgacatctggagtagggatgctttatccaaaggaaattagaattggtgaagtgatttcagttgaagaagataaagtaaaagtaatgaagaatgcagttgtaaaaccatatgtagattttaataagttagaagaattatttattgtctctccgaaggatacgagagaaattaaatataattagaggtttataatggaaaaattaattattattttgatttctataggattggttatattagataactcactaattccgtttttttcaataaagggagcttatccgagtttactatttactttcgctatagcttattcattagtcaataagaaagaacgagctgtatttatgggtgttgtgagtgggatacttcaagatattttcttttttaatggttttggtgtaaattcattattgaatttatttctatgtcttctagcaagttttattggagcgggaataataaagactaagagactgatacctgtgatctcggctttttttataacaataattaaatatgcaggagttatgttgatatttaatttttttaatattgaaatacaattttctaaaagtatcattatgggggtatacaacggagtaataatgttttttgtgtataaattagtaatgaatgtttatgatgatgagtattcaaagcaaagatggaggtttagatgatagtaaataaaccaactaataaaaagaaaaagaagatttctagatatacagttttatctataatcatgatagctatattttcagtgattattctaaaattattatatattcaagtatttaattatgatgaatataaggataaagcagatgtaacatcaacaagatttatatcagaaaaagccccaaggggtaaaatatatgatgataaaggaaatgttttagcaactaatattgaaacatacactattacatatacggaaacaaaagatgctgataaacagttttatataactatgaaagaacttttcaaaatattgaatgagaacggagaaagcattcaggattcgttacctttaaaaattgatggtaataataatttatattttgagtataaaactaatgataaacaatctcaaaatatagaggaattgagatttaaaaaggataggggattgaatgatactctaaaaaacaaaatgttcaaagatgttgaagaattatcggatgaacaaaatgcaaaactggatgaagaacttctaaaaataactcctgatgatgcgttttatgcattagttaaatcatataatttaattggccttgtagacccagattatgactcaaaagaaaagaagaatatttattccaaaatggaaggcaaggatttaacagatatgattttaaaagaaggatattctttaaatgatattagaaaattcatgcttgtaaaagatgctataaaaatgcagagttttaaaggatataaatcagtaagtattgcagacaatattaagaaagatacttcattagtagtaatgcaaaagaaatatgatttgccaggaataaatgtgagttcagcacctataaggtcatatccatataataatttagcatcttcagttttagggtatgtatcttcaattaatgatacacaaaaatcaacatatgaacttaaaggatatgatgtttcatcagactctgtaggaaagtctggaatagaatcagctttcgaagaacaattaaaaggagttaagggtggaacaactgttaaagttaattctaaaggaagcgtttcacaagaattatttaaacttgaaccgtatccgggcaatgatgtgcatcttacaatagatagggacattcaatatgcagcagatcaagcattagcagataaaattgaatatataaggaataatgaaagtgatgataaaggaaatagactgttgaatgcaaccagaggtgcattggtagccgttgaagttaaaactggaagagtattagctttaacaagttaccctaactttaatccaaatttattcacagttcaaggacaattaacgcctgaacagtataaggattattttaatcctgatttagagaagtttggacaggaatttattaaaagaatggggcttaataaaactgttgatgatttgtttccgccaaaaaatggaactagaacagatccatatgatctatatccgaaagcaatgtttaattatgcaacccagtcaaaaattccacctggatctacatttaagccgcttacagcagttgccggtttggagtctggcgtaataagtcctggagaaatgataaatgatacaggagcatttaatattcatccggagatttttggtaaagcttttgcaccaaaaggactagaagctgcacaaggtaatataagtttaacagcagctatagcaaaatcgattaacttttatttttatgagactgctactagaatgtatattcaggcaggaggcaaggctaataatgttgaagctctaaattcccttgctaaatatgcttggcagtttggattaggaattgatcctaatagtagtgctaaagaatcgacaggaatagaaataaatgaaagttttggtcaaacttataattttacatcatggagaaatactgtgttacagatgtctacagataatgtaattaattttctagagagtggaaactataataatacaatatacttttctccaattgatataagagataaagatgatgataatgatgaagttaagaagtctaagaaagctataaaagataaagttaaagatacaataaataaagatgttgatgatccaacagcggttagccatgatacatttgctaaagatattaagaaagatgtattaaatttgatgaataattcagacgaatacaaagcaagtattgcaggaagaaatataaatttagattctcaagctacattaatatcacaagcattagctcaatttgcagctaatgatcagccagggcaagtaagatcaccaggttcccttgtttcagcatcaataggtcagggaatgaatactttcactccgttgcaattagtatcatacatctcaactcttgcaaatggaggaacaagatataagattcatttagtagataagatcacagatggggatggaaatgtagtccaagagtttaaaccagaagttttaaatacggttaaaatgtcaaaggaaactcaggatgcggttaaacaaggaatgacagcagttaaccaagaagcagatggtaccggtagttctacatttttaggatatccaataccaacagctggtaagactggtacagccgattttgctgaggatcaattacaaaaaggaagagaaccttttgcaacatatgtcagttttgctccagcaaatgatccacagatagctgtagcagcagtagtatttgatggcggtcatggaagtaatattgcatcagtagtgaagtcagtttatgatgcttatttcaaggatcaattaaagaatgatacacagtatacttcatcgtcagatacatggaaaaaatatgttttaggtaatccgtataaccaagaagcaaatgcttcacaggcgaatacaaataaaactcattaataaaaatttataatagagactttgtatttaaatataaattgataaaaattaattaatttgtaaggtatctatattaggtatgcaattataaaaattgcataaagtaaacctaattatagatacctttttgtaaaaaaatagatttagtgaggataatatgaaatacaataatattctaaaaggaaaatttatcttaagaccaaatagatttatagcttatgttgaaattgatggcaatgaagaagtctgtcatgtaaaaaatactggaaggtgcaaggaacttttgatacccaatgcgacagtatttattcaaaaaaatgataatccaaaaaggaagactaagttttctcttataggtgttgtaaaaggagacagaatgatcaatatggattctcaagtaactaataaggttgttcatgaatggatattaaaagggaacctcttaaaggatgtaactttaataaaaccggaagctaaatataagaattcaaggtttgacttttatgttgagacaaagcataagaaaatttttatagaggtaaaaggggtgactttagagaataatggaattgtaaagtttcctgatgcacctacagaaagaggtgttaaacatcttagagaactcattgattgcattaaagaagggtatgatgcttacgtaatatttgtaatacaaatgaaagaagttgttcattttgaacctaatgtagagactcataaggaatttggagatacactaaaatatgcaaaagagaatggtgtaaatatagttgcagtagactgtttagtagatgaagacagtattaatataagggattatgttgatgtaatattatagtgtgatagctgttcaatgctttggtatatacactgcatattatcaaattttgatgttttatatgcttttgtaaaatttaatcaaaaattagtgaaacatatatacaaaaatagtcagtataatgatataattttagagaggttgccattttcaaaacaatttaactattttaacctgcaaaattcattggagggaatgaatgtataataatgatggtattttaataaagggaaataaagatggaataaatacaactatcaatatgaataaatttgcttgttttgatgatatgcttgtattactaataaagaaactttctaaaggaaagcatttttataaagggacaactctaatattaagaatagatttaaaattggttaataaaaaggaagtaggcattcttaaagaaaaattattaactcaaattgaattaaaagatattgttctagaggatatagaaaaggaaattgagcaggtgaacgaaaaagaggttaaggtattttccggtgtatacgaagggaaaactaaatttataagaaagacagttagaagcggagaatgtattaattatcaaggaaacatagttatagtaggagacataaatagtggtgcagaagtatatgcagcagggaatgtaattgttttaggacgtataaggggtaaagtgagcgctgggactaatggaaatataaaagcggtaatagcagcattcctactacaacctgaactattaaaaattgcaaatgttatagctatgtctccagatgatatcgaaaagccaagctatccagaattagcaagaattagggatgggttgataatagtggagccatatttaccaaataaatatatatactaaaacgtcggagggattttttaatgggagtatctattgtaataacttcaggtaaaggtggagttggaaaaacaacaactacagccaatataggaactgctttagcatcacttggtaagaaagtagttgttatagatggagatacagggcttagaaatttagatgtattgctaggattagaaaacagaatagtatatacaataattgatgttatagaaggaagatgcagattaaaacaagggcttataaaagacaagagatttgcaaatttatttcttttaccaacagcgcaaactaaggataaagatgatataagtccacaggaaatgttaaaaatagtaaatgaattaaaagaagagtttgattatgtcttaatagattctccagcaggaatagaacaaggttttgaaaatgctgtaataggtgcagaaaaagcaattattgttgtaaatccagaaataacatctgttagagatgctgatagggttattggtaagcttgattcaaagggattggaagaccattctgttattgtaaatagattgaactatgaaatgactaagaatggagacatgcttgatgtagctgatattattgaaacattatcagtagagttacttggagtagttccggatgataagaatataactatttcaactaataaaggtgaacctattgtgttagaagaaggtgcgattgctggacaagcattcagaaacatagctagaagaattacaggtgaagaagttcctattattgatttacatacagaagagcatcagggattttttagctccttaaagaagctatttaagcgaaattaagggaggttgagagaatgggtttttttaagagtttaaatagtaagccaacacctaaagaagttgcaaaagacagactaaagctaattcttatacatgatagaggagaaattgccccagatattattgagaaaataagagaagagattttagaagtaatttctaagtatattgatatacaagttgaggatgttgaaatatccgtaaataagaatggagatgaagaaggtgaaaatacttctgcattaatagctaacattccaattaaaagtataaagggaagataagtaacttgttttgtttaaattataagagatgtttgttttaaagaattgtatggctaattctttaaaacaagtcatctcatttttttataataattaagtttattcaatatggatgactttgggtatttaacaagatattatctttaaattattacaaaattattatgttttttatacccaatataattattatggagaatgcggtaataataatgtataattaagattgattgagttatataagattaatataactaggaggtgagatattgtttagactattaaaattagatatgaaattaattaaagaaattgataagactatattaatttctttaattcttttaattttatacggaacatttaatatatatctatgcacaaaaggacaatttggattgagttttgtaaagcaacagctgggttggtttgcaatatcacttgtagcgttatatatttttgtggcagtagattataagataatatttaactatgtacctatattatattggggagttgtagttcttcttatattaaccatggttccagggattggaatagtagttaatggtgctagaggatggatccgtttaggagtaggtaaccttcagccgtcagaatttgcaaagtttgtaattatacttatgctgggtaagaagttagatgagatggacggaaaaataaatgatgttaagaattttttcacactagcattttattgcatagtaccagtaatatttattgtaatccaacctgatatgggaatgagtatggtatgtttctttatagttttaggaatattttatacaatggggtttgatacgagaattattgctggaggattagcttgcttagtacttggaatagtgattgtgtggaattcaggactcatagaaacatatcaaaaagcaagatttacagcatttttgaatccaagcatcgatgatgcaagtacgtatcatttaaatcagtcgttgattgcaattggttcaggtggattacttggaagtagtccgtcgctggctcaagatggggttacaacatatgctgcacaaaatgtaccagaagttcagacggactttatttttgctgcaatagcagatcaatggggctttttaggtgcaattgttttgttaatgctttacggatttcttatatataagatgatttcagtagcacgaacatctaaagatatatttggctcagttatatgtgttggaatagtgtcatattttttatttgctatattgcagaatatagggatgacaataggattactaccaattacaggaataaccctgccgcttgttagctatggaggaagttcattgcttacaacagtgatttcaatagcactagtaataaatgtaggaatgagaagaaaaaagatacacttttagaatatgcatgttgctataataaatttatgctacaatttcaataagttgagtgctcgatttggaggaaaatgtaaaaaataattatagtgaatatagcaaaattatttataaaataataggattaataattttatccagtacagtagaaattgcaaataataattttgagtacagtataaaattattaatcttattttaatttttaaggattatttattataaaatagatgattttcgaagagtaggtattagtcgcataaaaattctaggcggtgtatttttttaattaagcaacctaaatgatatctaaatattgcggaatgtagcaaatacaaagattctgcaacaattttgttctcataattttatgaagtagtaaatatactttaatgtgaatgaatttgaaaggagtgtatcatgggcagctatagatcagcttatgaggattactataaaaacattaataatacaacgaaaggaagaaaggataaaaggaaccatttgacttcaggtaagaaggctaataatgctatcattggttcaagatatgggagtaatatgaaaagtaacgataagatgataaatgttttgattaagagaataactaaggaactaaccggagctacacttttattgctattttttgttggattgaagtataccccttacgcacaagtacaagaaatgcacattaaatgtaaacaagcattaaaccgaaattttaattataacgagtatatagatacttttagtacaatgcagataggaaatataaaaggtaaggatttaaagattggaaattttactgtagatgatttgaaaattgaaaatttaaagttaaggacttttaattttatggaatatataagaagcaacagtaatatgaacaattaaatttataggaaataacatattattatgaatataaaatatattttaatatttgattaggttccattttttacttgtgcattgcaaattattttgatatagcaatattataggggttagaaatgaagaaatggtatatggtattgattttagaactgtcgatattaatgtggcttggagattatgaaggttacattgttattagttttctgtgggtaatattgcatgaatttgcacatatgatagttgcaagtaaatttgggtgcaaatttaataatgttaatattagcatatttggtgctaaagtcgaattaagtgacatcgatgagttaactgaaagaaaaaaaatgattttatatttagctggaccatttttcaatatttttatggccgtggttatgtgctatttatatggatattttaagtatcaaattattgaagatagtataaaagttaatttctttttaggagcattcaatttattgcctgcttatcctcttgatggttcaagggtatgtgaaatactattatcaaagaagctattatataaaagatcaaagaaaattacagaaatctttagctttattatttcaggaacattatttttaatatttattataataatgatattacataaagttaatataagtttatttcttgcagtcatattaatcacatatgcaacatttatagaaaaagaaaaaactatgtatataataatgggagatatgatcaagaaaataagaaagttaaaaaagcataactatatagagaataaatcaatttctgtgtattataaaaaaggtttagttaatgttttatctttagttgataaaaacaaatttaacagtttttatattcttaatgatgacatggaactcattagtataatacatgaagatgagcttataaaagcattaaaggattatggaaatataacactagaagagtatgtacaattaaaaaagaaaaataattaagctcgttaaaaaataacagaaacgtaatggtgatttaacttactttttttataatttaagcatgtgatgaagagtaataactagtaccataataaaaatgtatcttttatgtgtgaaaatgcacttttgcattgtgattcagacaattacttacttattactctctaaatgtgattaaaaagggtaggagcgttaatatggatactttacttcatgggaaaataggttattttcttagcaaggaattaattgagagaggctactcaaatattattgatagtaacttttttatttatggaaatgtgttacctgacttaaagctcaaatatagaatgactatgcatagtaaaaatgaggattgggagaaggttatagggattattgatgaaataatttatggtgaaattaaaagaaataaggatatttcaattaagctaggaatattgagtcattacctatgtgatttttttacttttccacataataaagcttttgaaggaaatattattagacatgaattatatgaacaaactcaaagaattttatggtggaaaaagctatctgaagtgtggaatgaatgcacagaggaatccagaatagaattaaagtctatgaatgatatagtagattatattgaagatatgcacagtatttatattagaaatttaggagataaaaggcgagatattttttttagtaatattttagtgagagtagttttgtcatctatattaaaaataaaacaaaatatagatgaacataaagtagaagaaaatattaatagacgcatagtatgataatagttagtagtgtggagttaataattaaaattaattattaactccattttttatatagaaaattttagattttttatgaattacaaaaatttaaaatattaatttattgctttaacacaggtatttaaaagtaactgtataaaaaattgtgaaaaaattataatttaatgcaaaattttcatatgaagaatcgtattatatttagatagtataaaaaataactcattattaaagattggaggatatttatgaaaaagaaagggattataagcgggatattaacattatgtttaatattgtctactatttctattccgacatttgctgcggatgaagatagcaaaaacttagagcaagctatcatatcagcaaagaaaattataacagttccggatgattatacagagttcacacataattcaagcgaacgtgaagtaaggggggcaaaagttagaatttgggatttaaattgggcagaaaaagaagataagaaaggatcaatatctgtatcaataggtgaagatggattcttatatcaatatagtaattatgatggggatagcaaggatagcaaagatggtttagcaaatattacgaaagatcaggcccaagtttcagcagaagattttttgaaaaatgtaattccagaatatattggggaaataaagttagtaaaaaatgattcagcttcttttcaaggggatgagtataactttacttaccaaaagtttgtaaatgaaattccggttaactatatttatgtaaatgttggtgtaaataaatatagtgggaaagtgacatcatttagcaatgacaatttagaagtaaagggagctgaatatcctaatttaagtgggataattgattctgttactgcagaaaaagcatatatagataaaataggtatagatttaaaatattattcttattatgattatgagaagaagaaaatgaatatatttgcaggatattctccaagtaatataagtgaatttattgatgctaaaactggacaagtagtatcatattcaagtgataataaattagatgatagaaataaggatcattcattagtaaatgcttctgcaaataatttggataaagcaaatcaagagttgacacaagaagagatggatgcgattcagaatgttgcaaatcttataagtaaagaaaaggcagaaagtatacttagagaaacatctgatttaataacggctgatatgaaagttagtgatgcatcattaaataaaaactatcttgatgatgaatattcatggaatatttcttttgacggtgtatatggaagagtgaatgcaaaatctggagaagtaatatcgttacattcttataattataataaacttggaacaagtggtaatacttctaaggcagatgcgcaaaacacagtagaaaactttttgaaaaaagtagcacctaataagtttacacaaacaaagtttaaggatataaataatccaattttaaagattactgatagaccaatagaagaaaatacgtttatgtttaactatgtacgtcaagtgaatggaatagagttttcaggaaattacttgaatgttgaagtagataagaatacaggtaaaattattggttatgataataactggtatgataatgcctcttttcctgatgttagtaacgttataaataaagaagctgcattcaataaaattaaggatttagcaggattctcattacaatatacaatgttagatgaaaataaagttggaatagtatatgactttataaacaagaatgatagttatattattgatcctataaatggcataaggatagattataccggaaaagcatatagagaaaataaattaccagaatatacggatataaatgggcattggtgtgaaaagacagtaaaagaacttttagataatgggtattatatagatggggaaaaatttaatcctaatatgaatattactcaaataaatttctttaaatatatatattcgccagtaaaaaataattatagcgatgatgaattttatgatatgttaattcaaaatggagtaattaaagatgaagaaaaagctccaaattcagtagtatcatataatgatgcagcaaagtttattataagatacttaggctatgagaaattagctggacattctgaaatatttaatagtccttttaaagataatatagaagactcatataaaggatatgcatcaatgtgctatgctcttaatatcattaaaggggatactaatgggaactttaatgggtcacataatataagcaatgcagaagcggctgtaattttatataacctaataaagaacaacggaaaataatttaataaaagtgctaatctttttatgaggattagcactttttgttgttgcaggctgagatgtggaaataaagtcaataaattagtataatatgatgtaaacaacatattttatatgtgaaaaagttattgtttagaattaatattacataaggagagaatagctgatgttaacatttatttttttattagcatttcagggattttcaggtggagtagctggatatatcacaaataaatatgcagttgatatgctttttaaagaatatacacctttaaagctaggaggggtaattaaaaagaagaaggagaagtttattgaagagattagcgaattagtagaaagagatataataaatgcagatacattaaggtctgaaattcctaatataaatataaataaatatattgaacaaatggctcaaactttttttgagaagcaattaagcaatagtttaggaaatactaaaatagctgaaatagatggtttctctgatggcatacttaaaagtgaagaatttataagaaacaatctaaatatacttttaccagaattaatagatggttttatgcgtgatgttgatctgcaagatatattaagtgaaaaacagacatcaaaagttataaattcatgctatgagctactgatttgcgaacttgaaaatgctgatgcagtgaatggatttatttctgatttatacaaggaaaattctaatattactttagctgatattttttctaaagaagtccagaaaaaattaactgataatattattgagtgtgttgaaaacatatttaataacgatattttatcagatgaaaagtcgtgcaagatgtttttggacaatatgctttcaaatataaatgtagatgcaacgcttgtcgaattacaagactctatcgtaagtcggaatattaatcattttattacggaaactcagcaagaagaagttatttcaagattattcattaaaattactgaatttattaactcttctgaaggaaaggatttaatattaaaaattacaaatgagattgtttcaattgggaaaaatattgattttactctttatgaaatacttcctaaagagatagaaaaatcactcacgaattttataaaaatagttattcctaaggtcatgccttatattttggagtggatttcaagtaataaatcatctttggacgaaatgattgaatccgcaattgatgaagcgatacaagatatagatgaaagcataaagaaacttataatctcaaaggttagaaatgcacttatgggagatgtttcatctaaaaataatatagttaataaaattataagctatattaacaataattttgataatgaatcaagtgataaaatagtaacttctattatagattacttgaaggacacaaaggttaaaaatatagtagaagcattggagaaatacaatttagttacatctgatgagattgctgaaattgctactaaagtatttgcagttcatggaaagaatacgttgaggatactaataaaacctcaattttcaaagaaagtaaatgagattgctaagttagatttgttaaaattattcaatgcaaagtttaagccaatgttatatgaaagtatttttaaaaacaaaacgagattatgtaaaaacataaatagtttgattgcaaaattcataaattcaaagagtgatgaaatattccacaaaaagttatcagaattatttaaagacgaaagagtacttagtttatctaataaattttcaatatggacgaataatttgttcagaaagaacaaagatacatatagcgagaaattagaagaggtcatattatcaaatgttaaaaaacttaaaataggagatatattatcaaactataatgtgaacatattggaatatattgtggataattcagtatcaatttatagagaagctgtggataaatataagaattatcaagttaaggaattagttaataaaggatttaataagaatcaattatcaaatattcttataaataaaggttacccagcattaatatctaagcttccaaatctattaaatgggaatattaaaaaaatcgcaaaaaatagtttaagtaaatatgatgaggatgaaatatgcgatatagttcaagattttatggaaagtcaacttaaaccactttctgtttttggcgctgttttaggtactgtagttgggataatatatcaattaatatttccaaattctattggactctacggatttccaagtaatatgtttaatggattgttgtcacttggagttatgggatttataggatacataacaaatgttgtagctttgtggatgattttccatccatataaagaaaataaaattatatctaaaataccattttttaagaagtttgcattaggatatataccggcacataaaaatgagtttgctattggaatggcgaaactaattgatgaagaattattaaacaaagaggaaattaataaaagtttcaattctcataaagataatatgtcttcagtactaactaccttagttaaaaataataattatcaaattttagttaactttgctagaagtaaaaagaatgattttgtaaggtatatctataaaataattttaaagtattgtaatagtagttcagatttatccgaaggaattactaacagattaaaagaaagcaaatttgatgattttatcaaggaaagttacattcagaatggaatacttaaaataataagtagtattagtaatagtaaaagttctttaacgaagtttatagaaaatagaatatcttcaaattacaaaattggtgatgttatttcagaagatatacttattaaaatccaaaattatattcaagaggaaggcaataagtttatacaagataatcttagtactattgaaaaggtagattttttagagttaattacaaaagaatacaaagatgattattctgcagcgataaaacaatcgtgtaaagaggttataggtaaagattctatagaaaaagcaaaaattaatatagggaaatatgtatatgagtatttttctaatgactttaaaatatacttagaaaatatgacaagtaaatatttatgtaatggcttaaatgaaaataatgatataggatcaatgtttaatggtaaggtcaagaacatgattgataataacctgaatcatataacatattatttttcaaataagttaatatcatacttaagaaacaatcagaatattataactgaaaatgtacaagaaactattaagagtgaacttaatttctttgagaagatagcctatgcaacttttggtggagatgacatagcatatagagttgttgatattatactaaataaaaaacttcctttaatgctaagagaagagaatgataaacttattaatactacgaaagctgtattaaatgaaaatatataccctattagagtgagtgaattaaatataaagggtgaagaatttaacactcaaataataatagatgatttatttgagcaatttggtgagaatgttaatttaaagagttatatctatagagcaagtgacctgattttagattcattagctgtggcttcaatttcagagtatcttgaattatttgaattaagcactttggattcgatttataagaagttttttgatgaagccaatatcataaaagaagatatatgcagaagcataaatattaatagagataaattatctataacaatagaaaagttctttaatgaaaatatggtgaaaaatttatttaacattgaatttaattctgtattattaaagggaattgatagctatgaaattgaaaattgtataaataatattttaagcataattgttgagagcgaagaatcaaaaaaatcgatatctatgtttatggaaaatttctatgaaaatacattgtcggaattaaagatagaacaaattattgatgcaagtactctaagcaatgatcttgataggattattaaatatattttcgctaatgcagaatttaaccaaaaaattatgattgcaattgatgctatagttcaaaatgcaattaataacaactttaactttatatcagatagatctaaggattatcttataagtaaaactattgaaacaggtttaaattcagttggtgattatattgtgccaatattaagggaaataaatctaaagaatataagcaataagcaaattgagctgctcaatccaaaggaaattgatgtaatgttcaattcctttgtaggagactttttcaataagcttcgcctttatggagtgtttggatttgtatttggtataaatgccggattatcatttatattatggataattgattggagatatagtaagaaatacaatgataaaaattcaaaggctttgaaggaaatgtagaataaaataaattgtatatagtattggaaacaataagaatattcccattcagaattaattatgttagaatagggatagcaaataagaagtatagcaattagagtttatacttcttttatttatgcataagcaaaaagtgggttcatttagtatttgaaatactaaaggttttaaattctttaaatttgacaaaaatttaaaggcaagcatttatggagaattgcacatatgatggtgtgttttaaggaggaaatttattaatgaataaaatttcagatgatatcttatttaaagttgaaaaaccaagtagatacactggtggagaattaaatgagattgttaaagatctaaaggaagttgacataagatttgcattttgctttcctgatgtttatgaagtaggaatgtcacatttaggaagcagaatactttatcatactataaatcaaagaagtgatacatattgtgaaagatcatttgcaccatggcctgatatggaagaacagcttagaaaaaataatattccgttatttacattagagacaaaagattctctaaaggagtttgatattttaggattcacacttcaatatgagatgagttatacaaatattttaaatatgcttgatatgtctggtattactataagagcatcagaaagaggagaagatgagccaatagttatggctggtggaccttgcgcatataatccagaacctttatatgatatcattgatttctttgaaattggtgaaggcgaagaaatgatgaatgatgttttagatgtttataagaagtataaaggaaaaggaaagaagaaagaatttctaagagaaatatctaaaatacaaggaatttatgtaccttccttatatgatgttatttacaatgaagacaatacaattaaagaatttagacctaagtatgatgacgtaccaaaaactattacaaagagaattataaataattatactaaggtagattttcctacagatataatagttccctattcagaaattgttcacgatagaatagttctagagttattcagaggatgtacaaatggatgtagattctgtcaggcaggcatgctctatagaccagttagagaaaagacaagggaagatttaaaggatttagcaagaaaattagttaaaagtacaggatacgaagaaatttctctttcttcattaagtacttgcgattattctgatataaaaggattaattacagatttagttaatgagcatgaagacgacagagttggtatagcacttccgtctataagagttgatgctttttcagtagatttgcttaaggatatccaaaaggtaagaaaaacaggattaacttttgctccagaagcaggttctcaaagaatgagggacataatcaacaagggtcttactgaagataaaattttagatgcagctacaagtgcatttgcagctgggtggaaaactttaaagctttattttatggtcggacttccatatgaagagcttgaagattgcagaggaattggggaattagcagaaaaaatagtatatagatataaacaagtgcctaataagataaataataataaaggtttaagacttacagtaagtacatcaatacttataccgaaaccatttactccattccaatggtcaccaatggcgaagtttgatgaggttactgaaaaaatcaaagctgttaaatcttcaattaaatcaaaatgtatagtttataactatcatgagcaaaagacatctgtaatggaatctgtttttgcaagaggggatagaagattatgtgatgttttaattaaagcttttgaaaagggtgctagattcgacggttgggatcaacactttaaatttgacgtatggatggaagcaatggaagagtgtaatttaactgtagatttctacgcatatagagaaagaagttatgatgaagtattaccatgggatttcattgatattggagtaaatagaaaatatttagaaatagaaaatgaaaaagctaaaagagcagagttaacacaaaactgtagagaaggatgtacaggatgtggaattaatgtgaactttaaagatggggagtgttttgaaggtgcgatacttaactaaatttactaaagaggaaaatattaagttcatatctcatttagatgtgcttaaaactattcaaaaaaatattagaagagcggggctacctatagaatactctcaaggatttaacccccatatgaatacatcaatagcacaacctttatcggtaggagtctattcaagtggtgaatatatggatatggtgttaacaactgagatggatgaaaatgaaattgtggataaattaaatgagaccgcgccaagtggaataaaatatataagtgcacttgcaattccttataaagaaggagagaagaaagttcctcaagctatggctttaattgatgcagcaagatatactataaaaattaagtattctgatgtctcaaatttagaagaggaagttggtaaacttttagaaactaatgagtggaatacagtcaagaaaagcaaaaaaggtgaaagagaagtcaatataagggcttttgttaaggagtttagtttctgggttaaagatgagttcttaattcttaattcagttataagtacaggaagtagggaacatttaagcgcagatttacttgttagttatatccaagaaaaaacttcaaatgcgattttagattcgtttgttaataccaaaagagaagaaatgtatttttacaagaataataaacttgtaccattatataaatgtgtataaatatataattcacaatttacaatgctcaatacacaattaaggaataaatctcttaagagattttaaaaattataataaatgcaaaatactaaggtatcaaattatatgataattagattttcaaaggaaattgctcactaattgtgcattgtgaactgtgcattgtgcattgactaggatgtgttatagaatgaaagagatttttgttgagagaagagaaagaattttaagggtagctattaaatctaataatgaattgatagaaagtatcgttgaagaaagtaagaatgaacccataataggagaaatttataaggggaagattaaaaacataattccggctataaactcagtgtttgttgatttggggttagataaagaaggttacctatattatagtgatgaattaaaggcaaaaggaataaaaaagggagacgatatactagtagaagttttaaaagagcctcttaatgataaaggcgccaaattaactgcaaaggtgtcaattcccgggaaatatattgtcttaaattgttatgagcaaggaatagaattttctaagagaatagaagataaagaaaagaaaatagaactattgagtaatattgaaccgttaaaagatgtttgcataacagtaaggacagaaggtgcaaatgtagatataaatattcttaaaaatgagatttctaagctttatgatgaatttcaaaatatagataaaaaaatgaaacattcattaggagtaagaaagatttatggtgaagatttaacattaactaagcttttgatgaatttttctggagaagaaattataaaaatttatgttgataatagcattgattttgataagatatcaagctttgccaaaggacaggaaaatttaaaaatagagaagtatgaaggatatagaaaactttttgatttttatggaattgagaaagaactattaaggttgaggcataataaagttaacctacaatgtggcggatacatagtaattgatagaactgaagcaatgtatgttattgatgttaatagtggaaaaaacataaaggagaaaagtttcaataaaacaattttggaaactaatttagaagcggctagagaaataggaaaacagattaggcttagaaacttaagtggaattatagtaatagattttattgatatgagagataaaagtcaaagagatattgtaatggatgcacttaaggaaagtcttaggttagataaaggtaatgtaaagatattcccatttacccagctagatttggttcaaatagctagaaagaggcaaggaaaaagtatatatgaatatatggaagaagaatgcagcctatgtaaaggaagaggaataattctaaagttatcttatattgaagggctaataaaaaatgatatagtaaggatgcaggaagaaagttctataaattgttttcatatacaaatggatagcgtttataaagatagaataagagaaaatatttttgagtttatgaaagaaatagatggattagataaagagatatatctaaattatgtagataatatagaaggatataaaattgaaccactgatatttcaggggcaaaaagataatttaaaagattataaagttacagttatagaaaagtattaaatcagttaacaatcatgctaaattatgtttatatggataaattatagattatactttacaaagtaatagaaatatgataaactggcttttgtagaccgcgcacgtaaggttttatgtaaaacaaggttgaatctttgtaccaaaagtggcgagaccgttatgaggaggtgttttaatgtacgcagtattagcaacaggaggaaaacaatacagagttcaagaaggagacgtaatatacgttgaaaaacttaacgctgatgttgactcaacagttgaattaaacgaagttttagctgtaggaactgaggaaggtatcaaagttggtgcgccagtagttgaaggagctaaagttgtagctaaggttgcagcacaaggtaaggcaaagaaagttgtagttttcaagtataagtctaaaaaggactatagaagaaagaatggacacagacaaccttacactaagctagtaatcgaaaagatcgaagcataataaaattatggttaaagtaaaaatcaaacaacataataatgatattgttggattcgtaataaatggtcacgctataggtaatgacagagatttttcaaatgagcctgctttagtaggtgaagcatttgatatgatatgtaattcagtttcagttttatctcaaagtgtaattattggtttggatgaagttttagaacttaattcaacatacgaaatacaagatggatacttgaaattagaccttcaagattttaatctagaagaactaaatcaagctcaagttttattaaaaacttttgaaaaaagcttggaaagtgtaattttaggatttgatcaattagtagggaaaaagaaacgtagagaatatataactttaataaaagaggaggtgtagtcacatgctaattatgaaccttcaattattcgctcataaaaaaggggttggtagttctaagaatggtagagactctgaatcaaaaagattaggagttaaatctgctgacggacaatttgttcttgctggaaatattcttgtaagacaaagaggaactaaaattcacccaggtgaaaatgttggaaaaggtaaggacgatactttatttgctaaagttgatggagttgttaaattcgaaagacttggtagagataagaaaagagcaagtgtttacccagtagacgttgaagcaatagctgaataattattttagaaataaagcactcttagtttaagagtgcttttttaaggcatatgaaagaaaataatgagttaagaaggtgccgatgtctagagtgacagatatcagagaaatagactagcattttagatgttattttctttgatatgccttaatatttttatgataatatatattgtgattagacattaaatccaatattatataataaagcgatattttttaggaaagaataagtaataatagaactaaaaaattttatattaagatgataaagtaaaacaaacaaggaaaggtgatttttatgtttatagatacggcgaaggttttcgttaaatctggtaacggtggtaatggtgctatttcatttagaagagaaaagtatgtacctctaggtggaccagatggtggagatggaggaaaaggtggtagcatcatttttcaagttgaaactggaataacaacgttattagactttaaatacaagaaaaagtttattgcagaatctggtgaaaatggcggcggttcaaaatgctatggtaaagatggtgaaagtttatatataaaggtacctatgggaaccattataagagaagcagaaactaataagataattgcagatctttctcataaggggcaagaattagtattattaagaggtggaaaaggtggaaagggaaatgttaaatttgctactgctactaagcaagcacctcattatgcagaaccagggatgccaggagacgagttaaatatagttttagaattaaagttacttgctgatgttggattattaggattccctaatgtaggtaaatcaacattgttatcaatgacaacaaaagcaaaaccgaagattgcaaattatcattttactacattaaaacctaatctaggtgttgttgctgttgatgggattgatccttttgtaatggctgatattccaggaataattgaaggagcagcagaaggtgttggacttggaatacaatttttaagacatatcgagagaactagacttttaattcatatagttgatatatctggtgttgaaggaagagatccttttgaagatttcattaaaatcaatgaggaattaaagaagtattctgtaaaactttgggatagacctcaaattgttgtggctaataaatctgatatgctttatgatgaaggcatatttgaagattttaaaaagaaagttcaagaaatgggatttgataaagtatttaagatgtcagcagctactaatgaaggtgttgatgctgtaatgaaagaagcggcaagaatacttaaggatattccagttaaagaattagaaatctcagaagatgaaatgtacataccagaagaaaagagatttacttatgatattactgttgaacataataaagaagagggatatgatgtttatatagttgaaggtacatttgtagatagattactaagtgcagtaaatgtaaatgatgcagattctttaagatacttccataaggttcttagaaataaaggtatttttgatgaacttagagaaatgggagtaaaagacggtgatatggttagattaaatgattttgaatttgaatatatactttaattaattcaaatttaatattatattgctatataaaaatgttctgcttataattgagtgcagtgaaatttaagttataagttgaaaaataacccccagggataattaatacaacaaatatgttgaaaaattttaggaggaataaataatatgttaacaggaaaacaaagagcttatttaagaggattagctaatgatatttcaccaatatttcaaataggtaaaaatggtgttgaggaaaactttttaatacaagtttcacaagcattagaagctcgagaattaattaaaataaaagttttagagaacagtggtttagaaacaagagaaacttctgatatgatatgtaaagctgtaaaatgtgaaggaattcaagcaataggtaataagatagttttatataaacaatctagcaatttgaaaaagagaaaaattgaattacctaataaataattatatataggaaataattaatagagaagctgcttttatagaagcttctttttttataaaaattaagatattaaaaataatatttaagtttacttcatgatataataaaaaaggaatttttaatatgattataataagtataatacttttggaggaaatcttatgaaacgctttggtataataggtggtacttttgaccctattcataatgcgcatttatatatagcctatgaagctaaagaaaaattaagcttagatgaagtgatctttatgccggcaggaatacagccgcttaaggccaataatataattacagatcctggattaaggtatagtatggttaaagcagcgatagagcactttagcgagttttctgtatcggattatgaaatagagaagggcggacttagttttactcatgaaacattagagtatttcaaaaataagattagtgatagagataaagataatgaattgttttttataactggagcagattgtttgtttagcatggaaaagtggaaagaagtaaaaaaaatcttttcactagcaactcttgtggtgttctcaagaggaggaataaacaaaagtgatatgataaataggaaacatatgatagaagaaaagtataatggaaaaataattgttttagatttgaaagaacttgaaatatcatcaactgatataagaaatagagtacatgaaaataagagaatagatttttttgtgccagagagagtttcggatattatctataaaaataggctatatagatagaatttcataaagctaatggtctggtgatttatagaaatataagttgattcatttagaaatatatttaattttaggaggaagttatcttgttatccatagaagaaatgaatttgtatcttaaatctaatttattagaaaagcgttatatgcatactttgggagttgcagacacagcaaagaggttagcaaagctaaatggagtttcagaaaagaaggctgaaattgcaggtcttgctcatgatgttgctaaaaatttatctatagataaaatgagagaaatgatgaaagaaaataatgttattatctctgagatagaagaaaagaatatgaatttatggcacagtattgttgcaccaatagaggcaaaagataaacttggaattgatgacgatgaaatactggatgccataagatggcatactacaggtaaagaggatatgtccactttaacaaagattatttatatagcagatatgatagaacctggaagaaattttgatggggttgatgagataagaagaactacatttaataacttggataaaggagtctattttggtttgactagtagcataaaaatattattggctaggaacttattaattgatgaaaatactataaaggcacgaaattattttctatttaatcctgaatttaaattataagtattaatataaatagaaatttcgacttatttaatgagattagagaggttacttaatgtatattatattaagtaaagaaaatttataagaggtgggtgcatgagaaggaaaactaataaaaagagagatacagcattctcaaaaatttttaaaaaggataatgattctacaacagtatttgaaaagttagttttaggtattatatctcttataataacttttgttatagtatcaatggtatctggggtttatgctttaatgaaggttgagagcaagtcaatgccaagtggtgcaagtgtatcatttaatcagccagtaaatatcttgttacttggtatggatataggagatccgaagcaggtaaataatcaatcaataaagagaacggatacaataattgtagctaattataatcctcaaacaaaaagtattcgtattgtgtctgttccaagagatacgttaataagtataaatgatagaaatgttaaaataaattcagcttatgcaattggtggatatccgaagataaaatcagaagttgaaaatctactgaatataaatataaattatatagttaaagttgattacaatgcttttcgtgaaatcattgatgctatcggaggaattgaaatgaaaatcgatagaaatatgatttatgatgatgaaggtcagaatcttcatataaattttaaagctggtgaaactgtaactctagatggtaagaaagcagaggaattttttaggtggagaaaaaataatgatggaagtggacttgctaatggagatttagatagaatagaaaatcaacaaaaatttatttctaaggttattgaaaagtgtacaagtccttttgtaatatttagagcacctaaaataatgacagcattaggagataatgtagaaactaatctgtcaccaactgatattttaggatatgggtttaaatttattggtataaaaaaggaaaatgtaacaatggcaactgtaagtggaacaccaaaaaccataaatggagagtcatttttaatagttgataaaaatgaaaataaagatatattatcatcacttacttcatcttctgcatctaataaatcagcagaaggagcagcaaaagatgatataagaattaaggttttaaatgccacaaagattaatggattggcggcaaaagtagcaaaggaattaaatgatgctgggtatacaaaagttgatactggcaatactgaacttagtgataaaagtgagatacttagtaatgatgctgataaattaaagactattaaacaggatttaaatataaaagaaaatgatgaaaaagataacaagaaagaatataaagattatgatgtgattataatcttaggtaaggattttgaaacctttggtaagtaaagttaatttagagttttgtggtggctcaatgaaacactccacataatatgttgcttatttctagtagagtaatgcacataaacttaatggatatgtatggttagtaaaaatacaaagatattagaaggagtattatcgttattgtgcattatcaatttgacatattcctaaattatactatatgaggagaagataaattatatgagtattttagaaaaacaggttgttaacatagagaagggcactaaaataagagaatatttgaaagtggaacttggcttatcaacaagattaattagaagtgcatctcttggtaaaagaatatttgttaatgatgaagttgtaaaaatgaatagagttctaaatgagggagaaattattaaaattgatctggcaaaagatgaaagtcaggatatagctccagaaaaaatggatatagatatagtttatgaagatgaagatattttagtagtcaacaagaaaccttttatggtggtgcatccaactaaaagttatcaaagcgggactcttgcaaatggagtaatcaattattttatggagagcggtcaaaattgtatagttagattagtttctagattagatatgaatacatcaggtcttattataattgctaaaaatcagttttctcatggaatgctatctaaagaaatgagtgaaaataaggtagaaaaaaaatatttagcattagttcatggaattatgaaagaaaaacaggggacaattgatctaccaatatataaacctgaaggaattgaaaatggcattaggagagttgttgatgagagaggccaaaggagcataacccactataaagttgttgaagaatacaatgaatcaagtttagtagaatgcaaacttgagactggaagaacccatcaaattagagtgcatttgagtcacttgggtcatcctatttacggtgatacattatatggagatggggatgaagaagatttaataaaaaggcaggctcttcatgcatttggattagattttaaatctccaaggagtggtgaaatactttcattaagagcagaacttccagatgatatgaaagaattaattagtaaattgaaataaatttaatatgataagtaacaatgtaaaaagctcaagcatctaatttaataagttgcttgagcttttgaattattctattgtaagtatgattccataaaacttcttgataaatttaagaattcttttagagcaggagagatccatttgtttttgtgataaagtacttgagatattattccaaagtcagggcctttccaatttagaggaacaagtttaccactatttatttcatcatcaacagcaacctttggaagtaaggttattccaagaccactcattgtaaattgtttaatggcttgaacacttcctgtttctatggctacatttggctttatattgcaactgtttaatatattttccaaagtggctctgtagctacatcccatttctgttaatataagtggttctgactctatatcttttggaaatacttcttttttatttataaggggatggccaggatatgctaaaagcaacattggctctggaatttcgatttctgatataaattctgctgaattaatttttacacctaatgaaaatgctacatcaataatattatcatttaagaaatatttaaattcagcacaatttccaaattttaaagagatgtccacttcaggatatagctttttgtattctttaaggatttcaggaagtcttaatacacataaagattcagcagcaccaattgttaatgtaccacttggaacgtcagtattaagtacagcattttttacagcacttgatagttttaatatttgttttgcatatggcaaaagtttctttccttcatgtgttaaagttatgtttttacctattctttcaaaaagttttacaccaagctcactttccaaaagcttaatttgtgtcgttatactagattgagcatagcccaggttatcggctgctttagtaaaactttgaagtttgcttatcgttaagaaagcattaagttgtttaaagtccatataatcatctccatcaaaataattgattatgttaatagaaattatcaattttactaatatatgcataaatgatatcatacttataatagataagcaaaattaattttaagaggtggttttaatgggagacaagttgaaggttggtataataggtgccacaggaatggttgggcaaaggtttttatgcttattagaaaatcatccttggtttgaagttacagtgctagcggcaagtaaaaattcagcaggggtaacttataaagaggcaatagctaatagatggaagatgacaacaccattacctgaaaaatataaggatatggtagttaaggatgcatttaaagttgaagaaatctctggtatggtggattttgtattttgtgcaatttctctaaataaggaacaaactaagttacttgaagaagattatgcgaaacatgaaacaccagttatttcaaataattcagccaatagaaacgtggatgatgtaccgatgttaattccagagataaatggagtacatgcacagattattgaaagccaaaagaaacgtttaggaactaaaagaggatttatagcagtaaagcctaattgctcaattcaaagttatgttcctccaataagtgcccttatggagtacaatcctaaaaatattctagcatgtacctatcaagccatttccggggcaggtaaaacttttaatgagtgtcctgaaattattgataacgtgataccatttattgatggtgaagaagagaaaagtgagaaggaaccactaaaaatatggggacaaatagaatcgggtaaaattataaatgctaatagtccgattattacaactcaatgtataagagtacctgtagcaaatggacatttggcagcagtttatgttagttttaagaacaaaccttcgaaggaagagataattagtagatgggaaaacttcaaagttccagaaatagttctagggcttccaagtgctccaaagaaatttttgaaatacttcacagagaataatagacctcaaactaatttagatagagattatgaaaatggaatgggaatatccatgggaagattacgagaagataagatattcgattacaaatttgtgtgtctttctcataatacattaagaggtgcagcaggtggcggagttctttcagctgaatatttgaaagcttgtggatatttaaatgcaaagtaaatttttataattaatatatatttaaataaaaataaaggaagtcatctgttgcttcctttatttttatttctttaattttatatttataagcttccttaatccaaatactcctgctaaaacaattgcgacagatcctatatagagttctgaatttgcattgtttgataatgaattaatagaaagaggaaattcatactttctagatgttccagcagctaaatccatagttgtatattctttatcattaacataaacagtaccttttagtatattatcaccttcattaaatgattgtttgcttaaatcctgatcctgtatttttatttcagaagatactgaatcttcctgacccttaggaacatcataatcaatatctcttgaggccataacaggtattgtaagattgttagttattttgtactgtgagacttcatcgcctttttggtaaaggtgaactaaagaataattatcaaagccgtaatttaaaactgcttgcatgtcatgaaagttttgatctttatcaagcgcatttaaaaatgaagctacaagaacatgtccgttcttttctgcagcagctacgtaagtatgatttgattttgttgtatagccatttttaccgcaaagagcaaaaggataataatatctagaattcttatttatcatataatttttattgttaagtacaatagtctttgaaggattattcttaagcgttattgtgtaatttggtgtggtagatagttgaacgtaatctttattattgatagcttctcttaaaaataacgctaaatcgtgagcagtagttgtatgttcaggatctggcaatccacttggatttttgaagtttgtgtgtaaagctccaagttcttttgctttttcattcataagtttagaaaatgcttctgtacttcctgatatgtgatcagctaaagcatttgcacaatcgtttcctgattccaaaagaagccctaaaagcaaatcgcgaacagttactacatcaccttttaataaaccaacagcagttccatctattttggtgaaatcttcttgaactgtcacttcatcatctagtttgcacttttctaaagttataattgcagtcataaccttagtagttgaagcaggttctaaaactttctcttcatttttcccatataacacttgtccagtagatgcatcaattaaagcgcaaccctcagcgttaatctgtggaggctgtgtttctgcttgtacactagtataggtaaagcaaaataaaaacaagaataatatattaaatgttttaaaaattcttttcataaaattctccatacttatattaaatatttttaatcgtactcaaaatacattttatcaaaaaaaaagaatttacgctatacaaagttcaaatagattccaataagagtctaaataataaaaaagtggaaataatatctaaggagaaattgtaaaggagaaaaagaagtggtacaagagttcttaaaagataagaaaaaaattggtatatttagtatgctatttattgtggtaattgtacttataggattatatgtgaaatctgggtttaaagagctgaagaaaaatgatactgaaagtatctttgtagatgatagtattgaggctgatacatcaaatgatgaatcagttaatgttaaaaataataataaatcaaataataatgatagcaagaaacaaatagttgcagcaaaaaataagaatatagttgtagaaataaaaggagaagtaaaaaagccagatgtttatacaatgagtgaaaattcaatagtaaaggatctcatagacatatcaggtgggcttactgaaaatgcagatttaagtaatataaatagagcaaaaaagttgcaagatcatgaattgatttatatttcaaataaaaatgatgaaaacaaggaaatccaaactgtaaattcaaattctagtaataaagatatttcagataaaaaaattaatttaaatagtgcaacattagatcaattaaagacattaaatggcataggtgattcaaaagcaaaaggcataattgaatatagagaaaaaagcggtggatttaaatcaattgaggaaataaaaaatgtatctggaataggagataacatgtttgagcgaataaaggaacaaattgaagtttgaacaacttacaaatatattacattaatacttgttaacgttataataattgcatgaaagagtaaaaaaatatataataaacagtggtatatcaaaactaattatattaaatgaatgtaaaagcagtctagaaaagagaacataatattatttaggtaagaaaaaaggcataatattgacacatagttgtaatacactgatggtaaaattgtattattcatttgtcgtatattagttagacataaaaataacatctaatttaaataagggggaaaatttagtgtctaaaaaggttataagtatacttatgagcataatagttgcagcatcgttagctgggtgtacaaatgctacagatagttcaacaaagaaaacggacacaacaacggaaagtagcacaaactctaatgatgacagtttagagggaaaatgggcaaaaaattatacattagatcaaacacaaaagttatttaaagataaattatcaaagatggagaatataaccaaggatttaggggtaaaatatacaaaagatgagaagacaagaaaagaaaaagatgaatctgtaaatgataactccatatattttgacaatgaaaagccagaagtaaataaaattgaaagtatgtattttggaatgaaaacatatggtgataatttagagactggtgatataagtctaaagttgagtttgaattttgatggtgagaatgcaataaaaaataataattttgatttaggaaagacatcttttaaaaagtacatagaagcatttacagaccaggaaggtagagattattcagacataaataaacaaataattgataaactaaaaagtggtgaaaatcaagttcagattaataacacaattgatggcttaaaggaagaaatcttagctaccaaaacgtgtataatatataaattatctacaaagaaatacaaatttgctgatggtgaaatgagtatgaagtagattacaagggggaaaaatttttggaaaaagataacttaaatgaaaatgaaataaacgatgaagtggaagaaaacgaaattaaaaagatttcggatactgaagaagaagcagatagcaatgttaataaagaggttgaaagtttaataactagcgatgaagaatcagataaacaatcttcttctaaaattatattagctaacgcacttgatcagttattaatgattgctggttcagctttattagtactattgtgtgatataattttaaaattatgtggatacatgttcgtaagggataatggatctataattttagcaggaggaataatatattttattataaattgtatttatgccccaataatggaaaagagtaaactagaaaatacttttgggaaaaagatattaaatatgaattaatttataaaccgaatttactattataatttaaagaatataaaaattactttttatattcttaatttttattagagataaaattttaaaatataagtacttaggagtatatgatgaaaaaaggaagcgatttaagcgttaaaatagaaaagttgcaatttccatctacaggaataggttatgcagaagataagactatatatgttaagaatgcttttccaggtcaaacagttacaggtagggtaaaaaggaagaaagaagattatgcggagttaaaattaataagtgtagatgaacgagctgattatgagattgaaactccatgttctcattttggagtttgtggaggatgttcatcacaaagtataccatatgaaaagcaattagaatttttaagcgaagaagttaaagaattatttagagaagcaaatgttgacacaggagagtatttaggcattcaaggaagccctaaccaatgggaatatagaaataagatggaatttacatttggtgatgaagccaagggagagccactttcactaggtatgcatatgagaggaaaatcctttggaatattaactgtagatgaatgtaaacttgttgatgaggattatagaaaaattattagattgactgctgattactttagagagaaagatttgccttattatagaataatgaaagctgaaggctatttaaggcacttagtgataagaaaagctcaaaatactggtgagatattagttaatttagttactactactcagatagactttgatttaggtgaatatgttaaattgctaagagatcaaagttataaaggaaatttagtatctataatccatactgaaaataattcgaaatcagatgcagtaataccagaaaaggtaaatgtgttatttggaaaagattatattagagaaacattactagaattacaatttaatatttctccattttcattctttcaaaccaatacaaaaggtgcagaaagcctatattctattgttaaagagtttatgggagatagtgaagaaaaaattgtatttgatctctattgtggtacaggaacaatagggcaaatagtagctccaaatgcaaagaaagtaataggaatagaacttattgaagaagcagttgaagcagcaagagaaaatgctaaattaaatggattaaataattgtgaatttatagctggtgatgtagcagaaataataaaaacagtaaaagttaaaccggatataataatattagatccaccaagaactggagtacatcctaaggcgttagattatgtaattaaatttaatgcaccagagataatatacgtttcctgcaatccaaagacattagttaatgatcttagagtacttacggaaaagggatataaagttattaaaactaaggtgaaggatatgtttcctaatacgcctcacgctgaaactgtggttaggctaactaaggaattgtaagcaaaccataaaccatctcaattcctaccaatcccaggcgattattattaaaccataacgaaaccgccatcctggtcggaattctatctaacccaaaattcaaacaaaatcccagagctgagatcaaaatcttggctctttttttcataccaagaaataggtttaagagaagaaggaagaaaggattatatgaatcaattcaacaagaaagattttgagattagttaacattaattatcaaatatttaggtattgttatgttggaactttttaatatgacgatgcctacacttaatttatatctacttcctgatatccaaccaataatacgaacagtactcctcattaagcctagcattgtgccttattagtaatttttgtataatcttttccggtgtaataatgaattaatcatatattttctcgttctaatcttcactatgagtaataagtgtaaaataaattaaaaatttttcttattattctatataaaaaattataataaaaagttgaatttaagatattccttaagattgtcattatacaataatgacaagattgtgctaataaaaaaaatgaagtaaaacaagttattatattatatactgcaaaaaataaatagaaataattcataatgaaaaatttatagctttaaaatatttgataaaagatgtaggtgaaatttaatcaaactacattatacactagaattaatattatgagcttgtacatttagataaaagagtactttagctaagttattcaaatgttgtaagaaagtaatattgaaggcatgaaaattcaggaatgtataattaatgtatatctatccccttatttaaaaaggatttaaattctattttcaataggtaaacactctaaaaattcaaacttgtcagcataaaataaagacaataataattttcttttagttgagaaatagaccgattacatcatataataaatcaggaaggggggacgatatgatgctctcagcaagattaattcaaattttatttcttttgctcaattcatataagcctattccagcaggaagtctggctgaaaatttgcagataagtaagagaacaatattcagagagttagaaaatgcagataattatttaaaggattatagccttaagttagaaaccaaatctaaaaaaggaataagcattattggaagtaaagctaacaaaaacatagtattaaatgagttaaacaatttagaatatagtagtccgaagaacaaagaagaacgtcataatcggatcattcttgaactattaaagcaggaagaaccgcaaaagatatattattattcaagtcttttaaaggttagtgaagcaacaatcaataatgatttagatcctgtggaagagtggtttatgaaaagtaatgtaactttaattagaaaatctggccttgggatttatttagaatacgaagaagaagattatagaaaagtatgtatgagatatatttatcaaaaaactgaagatccgcttaatagattatctaacttggtagaagctaatattgtaaacaaagtaatcgattcaataaaaaaggttagggataacagattaagcgaggtggctgaaagttcgtacacagagcttatagcatatttatctataacaacaaaacgaattatagaaggaaggaaaaatacaaaggaaaaaaatattaatttaacgttacaaagcattaaggattatgaatttgtaatagagttagttaccctgcttagtgaacagtttttaattgaatatacaactacagaaatcatagatttatatatttacattaaaggtgctaaattgcagcacattaacgaaaatgaggatatttttgatacagagtccgatattaggtatgttgtatatgatatgattcaggaatatgacagtactttagcttatcaaataaagcaggatacagaatttataagaggactcatagctcatataagaccaacaattatacgcttgcagcatggaattgagattcaaaacccgtttcaaaatgaaataaaacgcttatatccgcaaatatatgaaaaagctgaaagggctgtaaaggtaattgaatctaaatataatcttaaagttccagcgcaggaattaggactgcttgcaatacattttggcggagctgaaataagactgcagaataattataaattcagtaggaaaatagatgtaggagttatctgttctagtggaataggaatatctgctttattatcttctgaaatttcgaaatttttcaaggatgaagtaagggtaaaaactctttcctttaatgatttatcctctgataagatacatgactttgaggttttagtatctacttttgaccttaatgactcacaatttaattatattaaggtaaatccaatgcttacagaagaagatgttttacttatttcaaatgaaatagaaaaagcatctctaaatagtagaactagtaatactgaggaaaaggaagatacacttacctatatagaagaaataggtttaattactaaagaaataggctctattattaaaaattttgacttatacacattaagttcagaaattacaattgatgaggctatgaaatttgtaagtgaaacaataggtgggaatgaagaaagtaaaaattatatatataacgatttgatgaaaagagaacaagtatctactcaggtcataaaagaatttgaatttgtattattacacgcaaggacaaaaggagtagaggcctcaaaatttattctaataaaacctgactcagctcaatttgatgatgaatatttttctaattcaaaggtaattgtagttatgttaatacccgaagatgatccgagagggatattggcaatttcaagtataagcagtgctctatttgatgatgatttgtttttaaatgatattaaaagcggtaaaaaggaaattatacaaagttatatagaaaaaatattgaaagaatatcttttggagcaagtaaaaagcttataagtagaaggagataaagttatgttaaaagatatgttaagaaacaatataaaagtaatagatgaagtatcgtcttgggaggaagcaattaaaattgcatctactactcttaaagatggaggctttataaaagaagaatatataagtgcaatgcttgaaaatgtagtaaagaatggaccatatatagttattatgccaggtatcgctatgcctcattcaagaccagaagatggtgtgttaaaaactggaatgtcccttttgaaattatctaaaaatgtaatgtttccagaagaaaaagaggttagcttaatttttgttttagctacaacggatcccaatacgcatttatcattaatatctgagttaactaacttgctcatggatgatgaatctttagaaaagatgttttcagcaaaatccgaggaagaggtacttgagtgtatatgttaaataaaattaaatcatacaaattcttagttaactcctttgaggtaaatgcagattattatgaaaaagatatagaaaatatatttataccacttttaaaacaattgacaaatttagaaaaagataaaaacagaagaattttggtttacttagcagcttcacctggagttggcaaaagtactttagcttcatttttagagtttatctctaaaaatgaagctggcactcaggaaatacaggcaattgggcttgatggttttcattataatcaagagtttattaaaaacaataaagtaataattgatggaaaagaagtgcctatggcagaagtcaaaggatgtcctgagacctttgatttagataaattaaagtccaaaatagtaaagctgaaaaatgaaaatgttaagtggccaatttatgatagaaatttacatgatgtagtagaagataaaattctagttactaaaaatattgtgctcattgagggtaactggcttcttttagatgaatatggatggagggatttaaaggagcattgtgattatagcatttttataaaagctgaggaggagatgcttaaagagaggttaattgaaaggaagagaaaggggggggggtccaaggaagcagcaataaaattttatgaaaaaagcgatagtaaaaatgtaaaaagagtactgaataacagtttaaaggctgatttagttctagaactatcaaacgatggaaaatataacaataggggggatttttaatggatactagcaaacgattacaagaaaaagatcaaggaggagtgtcattggaaagtacaagcatgagagcgaaagtgcaagcctttggtggatttttaacagcaatggttattcctaatatgggagcatttattgcatggggatttataacagcactctttataccaacagggtggatgccaaatgattactttggaaaattagtatcccctatgataacttatatgcttcctttattacttgcatatacaggtggtaagcttgtttatgaattaagaggaggagttgcaggtgttattggtacttttggactaatagtaggtggaaacataccaatgtttcttggagcaatgattatgggaccattaagtgcatatcttataaagaaatttgatgctcttattgaggataagataccaactggatttgaaatggttattaataacttctcattaggaatactaggactaattcttacacttttatcttattctgtaataggtccagtaatacttgaagcaaatgcagcgataactgtagctatacaaggcttaataaacacaggaattttaccaattttagcaattattaatgaacctgcaaaggtattgttcttaaataacgtaattgaccaaggaatttactacccattaggaatgcaggctacgttagctgctggaaaatctatttacttcatggttgcttcaaacccaggagcaggactcggattattacttgcatactcattatttggaaaaggaacttcaaagaaaacagctccaggtgcaataatcatacatttcttaggtggaatacatgaaatatacttcccatatgtattaatgaaaccaatattaatcctagcaatgatggctggtagtgctacaggtatagcaacatttagtttattcaaagtaggtttagttgcaggaccaagcccaggatcaatatttgcatacatggcattaacaccaaaaggtaattttactggagtaatcgctggagtgtttatggcaacacttgtaagttttttagtagcatctttcatattaaaaacttctaaacaagaagatgatgattttgaagaatcggttaagaaatctaaagaaatgaaaagccaaggaaaacaaatattaaatgctgctttaataaaaccaatccaatttgtagcttttgcttgtgatgctggtcttggaagcagtgctatgggagcaagtgcatttagaaaaagagtagaaaaagaaggtcttgaagtgacagttaaaaactatgctattgaaaaagttccacaagaagcagatgtcattgtaacgcataagaacctactcggcagaactagtgctgcatggccagaaaaacgtatagtaaccattgaaaatttcatgaaggatgttaatatagaagaattattagaagagttggttgagcaaaaagcaaaattatagatagtaaggagacgttgactaatgaaagcaagagcagctgttatagctgggaaaaataaaatatatataagagaatttgaattaccagaaattacagacaatgaattattagtaaaagtgatctcagatactgtctgcttatccacatacaaagcgctaattagaggtgaagaacacaaaagagttccagaagatgtttcagaacatccagcaattacgggtcatgaattcgctggaattatagaaaaagtagggaataatttaaaagataaatataaagaagggcagagatttgtgctacagcctgcaatggggcttgaatcaggatattcgccaggatatagttatgagttttttggcggaaatgctacctattgcataattcctaaagtagcaattgatttaggctgtgtacttcccctaaatggaacttactttgccaatgcatctttatcagagccaatgtcatgtattataggagcatttcatgcaaattaccatacaaaacaatacgtatatacacatgacatgggaataaaagaaggcggaaatgttgctctccttggctgtgcaggaccaatgggcttaggcgctatagaatatgcaattaatggagcaataaaacctaaaatggtagtagttgtagatattgatgaaaccaaattaaatagagcagccagcttaattaaagttgaggaagctaaagaaaaaggtattgagttaatatacttaaatactaaaaatatggacacagtaagtgagcttatgaagttgtcaggcggcaaaggatatgatgatgtatttgtatttgcagctgcaaagcagttaatagaagctgctgatgatatcctaggtaatgacggatgtttaaatttctttgcaggaccaacagataataactttaaagcacaatttaatttctataaagttcactatgaaggcactcatatagtaggaacttcaggtgggtcaaaaggggatatgcttgagtctatagaattgtctgaaaaagggctgattaatccttcctttatgataacccatgtcggaggattaaatgcagctccagatactataaaaaatttacctaatattccaggaggtaagaaattaatttattctcatatagaaatggaacttacagcaattgaagactttgaaaagctaggtgaaaataacgaattttatagtaagctatctgaaatatgtaaaaataacaacaatgtctggtgcgaagaggcagagaagttcttacttaataatctttaaagcaaattttaaaagaaaggggctgttacataaagaataaaaattacaatgtgttgtattagatgtttgaattttaaatcaacctattgtggttaggtttcttaaatggcagtccccttttgtattttttgaattacataattagtaagtggaggtaaaaaatgaatataaatgatataataatttcaccatcagtaatgtgtgcagatttatgcaacttagaaaaaagcataagggaaattgaaaaagaaggtattgatacaattcatattgatttaattgatgggtattttagtccaagtatgcctttaggtatagatacagttaaaagtttaagaaaaatcacagatatgaattttgatgtacacatcatgtctaataacaatgaattttttattcaagagatgataaaaatcggagtttcacaaatatcttttcattatgaaagcagcacacacattgacagatatataaatctaattaaaaagaatggaattaaagctggattggcactcaatccatcaacttcccttagtgttttagagtactgtctgcctcagtgtgacacgataatgctaatgttaattaatccaggctttgcaactgacaaaaatgaaaagcaagtgatatatgctgaaaagaaggtaaaagatttatataaacttattaaaggaaatggattaaatacaaaaattgaagtagatggacgcgtttctttagatacaattccaggcttagttaaagctggagcagatatgttggtagctggtagcacaagcttatttattccaaatcaaagcattgctgaaaataaagctttaatggaaaaaagcatattagaaggattgaaaggtagagaggtgatataaaatggttgaatttactgatatctcaaaggaaattattaaagaattagaagaaacattagtaaaaataagtgatgctgaagtagagcaattatttgagcagattcaaaaagcagataaagtattttttgttggtgtaggaagagtgttattatccttagaagctgttgcaaagcgtctagcacatttagggattaacagcgttgtggtaggtcaaatcacagaacctgctattacagaaaaaggcttattaattgtaggttcaggaagcggagaaacagcttttcctttagctattgcaaggaaggcaaagcagcataatgcaacagttattcatattggagcaaatccaaacagctccatgaaggaatttgctgattactttgttagaattccagtcagcacaaaattaaatttacctaatgaagtaccttcaattcagcctatgacaagcttatttgaacaaagtcttctacttctaggagatacgattgccttaatgatgatcaaagaaaaaaatatagatatgccaagtctatggcaatatcatgctaatctagaataaaatcaaaggagataatttatatgcgtgcattacattttggtgctggaaatataggaaaaggttttattgggtatttattaaataaagcagggtttgatgtttgctttgtcgatgttaatcaaagtgccatagataaaatcaatagaaataagagatatctggttgaattattagatgatgatcatactgttgaagttatcagtcctgtatctgcattgaatagcattactcaaaaagaagaagtattaaattcaattgttaaagcagatattattactacctctgttggaataggaaatattccacgtattgctgaatgtattgctaaaggacttttaaaacgtattaaaatcaataaaactaaaataaatattattgcaaatgaaaatgcaattaatgcatcatcaactttaaagaaggaagtagaaaaatacctttctaatgaagaaataaataaaatatgtgaatatgttggctttcctaattctgcaatagatagacttgctttatcaaaagaaaacgaagaagatgaggttgcgttagtagaacctatatatgaatgggttattaatgaatcagagatggttaataataacttaccatatataaaaggagtaacgtatgttgctaatctaactccatatattgaaagaaagttgtactgcgtaaatatggcacatgcagctacagcttatcttggatttttaaatggagaaaaaactattcaagatactttgaaaagtcatgtgattgaatctattgtaaaaggtgcacttaatgaaacagcacaatattttattaaagaatatgatatttctttggaggaaataaatatttttatggaaaaaattttattacgttttaagaataaaaatataagtgatgatattctacgtgtaggtaggtctccagttagaaaattaggaatgaatgaaagacttgtgggaccaactttaaaattatatgagaaagaatatccagttaaatatatggcaatgttagttgcgggagcattattatttgataatcctgaagatgaagaatctgttatcttacaacaatatattaaagaaaatggtattgaagaatcaataaggcatttcacaggaatagacgatggatgcttaattataataataaaaaataattattgtaaattaaataattatgaagaaagaaggtctttattagctcatagataaaagaatttagctacctataactaaaaagttaaaagaaaaaagatactgataagataaataattcattctttagaataatatgatactttgaaaatatatagtataaagaatgatctgtatattaatcatataaaacaaaactataagtctaaattcattacaaacttttttagacacagcaaacgcaaaacacattaaagaaataaatgaaatagggttagccgtgaatttctaacagcaggagttgcactatttatgcatgttcctaagataaactaaggacatgcataaatagaacaacttctactgaagaaatgtctacaactaaatcatctgatataacgcttccacaaaagcatgacaatcatttctggtctggggttatatttcaaatgataaaaatatatattcttaagaatataagaatgtaagaagttacgaataaaagaatataagaatttataaatgaaaatataaaagaacttaaaaagtaacggagaaaaaaggtgacaatataaaaaggtgtggtaaaataggcatcttttgaaaagataatgaaggatagctaagattatttcaggtttgaaatgaattcgaagcgcagcatgggacttaattagcacaactaagaacttataaaaaaatatgtctatgaaatgaggataaagatgagtagagaattagataaattatctattaacgcaataagagtattatcagcagatgctattgaaaaatcaaaatcaggacatccagggttaccacttggatcggctacaatggcttatacattatgggcaaagatgaatcataatggaaagaaccctgaatgggataacagagatagatttgtattatcagcaggacatggttcaatgcttgaatattcattgctacatttatttggatatggacttacagttgaagatattaaaaactttaggcaatttggaagtttgacaccgggacatccagagtatggccatacaaaaggtgttgaaataacaacaggaccacttggacaaggtatttgtaatgcagtaggttttgctatagcagaagcacatcttgcagaaaaattcaataaaccagattatagcgtagttgatcactatacatatgctatagttggagacggatgccttatggaaggtatctcaggagaagcatcatctcttgctggaactttaggtcttggaaaattagttgtattatatgattcaaataatatttcaattgaaggaaatacagacatagcatttagagaagatgtagctaagagatacgaagcttatggatggcaagtactaaatgtagcagatggaaatgatatagatgcaatagaaaaagcaatagaagcagctaaagcagaaacaacaaaaccatctattataacagttaaaaatcaaattggttttggatgcccagcaaaacaaggaaaagcttcagcacatggtgaacctttaggagcagacaatgtaattgctatgaaggaaaacttaggatggaagactgagctagcattctacgtaccagacgaagtgtacacaaatatgaatgaacacatagcaaaaggtgagaagactgaagaagcttggaatgagttgttcaaagcatatgcaaaagcttatccagaacttgcagcagaatatactaaatggatgagtggagaaattgataaagaagctttattaaacaatgaagaactttggagctttgataaagaaatggctacaagagaatcttcaggaataatgataaatagattagctaaactaattccaaactttattggaggatcagcagatttagctccatctaacaaaactcatatgaacgatagaggagatttctcagcagaagatagaagtggatcaaaccttcactttggagttagagaacatgctatggcagctatcgctaacggaatgtatgctcatggaggacttaaagtattctgtgcaacattctttgtattcagcgattacatgaagggtgctatgagattatcagctcttatgaatcttccagtagcttatgtattaacacatgatagtattggagtaggggaagacgggccaactcatgaaccaatagaacaattagcagctcttagaagtatgccaaatatgacagtatttagaccagcagattcaaaagaaactgcagcagcttggtactatgctgtaactaatggaactactccaacatcattagtattaacaagacaaaagttaccactatatgatggatgtcctaagagagcattaaagggtggatatatcttaaaagattctaagaaagaaactccagatgtacttttaatggcatcaggttcagaagtagaattaatctataaagcagcagctgaattagaagctaaaggtatagatgcaagagttatcagtatgccatcatttgaattatttgatgttcaagacgaaagctataaaggatcagttatgccaaataaagttcgtgctagagttgcagtagaagcattaacaagctttggatggcacaaatatgtaggtcttgatggagatgttatatctttagatacttttggagcgtcaggtaaagcagaaatcctattcgagaaatttggattgactgtagaaaatgttgttgaaaaggctattagtgttattgctaaataaatagcatttttatgcgttttagtatcatctttctaccaaaacacaggttgaaacagctgcgaatatagttaagaaatagattaatatcaattaagggttttaagttaatattggagtgtattttatattcataggataaggatttataagagctaaaaaatctcttaatgttccccaaggttatttggggaattttttgggttaggggagaaatttttacgcagaaataagtatatttataaatattgaataaaagttaagtttaaatatttgttgtgagtatttaatgtttaaagatagagagcagttcaataagatgatagaggattgcaaagcaggaaagatagatatgataaaaatcaagtctataagcaaaagtactcttgatactttgaattctgtaataacgcttaaagaactggcattggtgttatttttgaaaaagaaaatataaatatcttagattcaaaagggaaagcaataattaatcataaaaagtttttatgttatgataataatgaagagggaaaaaacaaatcaatttatattgtatttacattgatattctatactcaaaagaggaaggtgatagatttgaataagattttagttatagatgatgatgattatataagagagcttatttgtacagtattaaaagatgaaggattttcggtagctgaggctgtaaatggaagggatgcattagaaaaacttggggaggaaaaaattgatctttgtgtacttgatattatgatgcctcaaatggatggctatgaattttgtaaacaagcacgcagatattatgaggatatgccaattttaatgctgactgccaaaagcgaactttctcaaaaagtaaagggatttgaacttggcacagatgattacttaacaaaaccatttgagattgatgagttgcttgttagaataaaagctcttttgaggcgttataaagtagctgcttcgcggattattaatattggtaatttagtgatggataaaagtagttatacagtcattagtaataatgaacaattcgatatacctatgaaggaatttgaactcttattcatgcttggaagttatccgggtaaaaccctttcccgtgacaggctcatagaagaggtttggggtcttgattttgaaggaaatgaacgaacacttgacgttcatataaatcgtcttagagagaggtttcagtctgatatttacaagttcaaaattactactattaggggtcttggttacagagtggaggaagtgaagtgagggaaggaaacaggtattttttttcactaatactaatttttattataacattacttggtcttactagtggatattacatttgtatatttattttcggtaagtcagaaagcattcctctacatataatatttattgttcaaagcttaacttctgctgtgatatattttctaggttggaaagcatttatatatatgcactggcgcttcgctaataaacataaaaaatttgatctttcacattttccaatattaagcggagctgttgaagccatgaacaagatagcttctggtgatttcaatgtacttgttaaaacaaatgaactcgatccttttaatgaggtagcagacaatgtcaacagaatggcaaaggagctagggtctttggagaaactacgccaagattttatatcagatgtgtcacatgaaatacagtcaccattaacttctatatcagggtttgctactctgttaaaaaaaggaagtttagataaggatcagatatcacattatgccagcataatagaaactgaaagtaaacgattatctaaattaagcgaaaatctattaagattatctaatttggaatcagaagacaataatttaaacttaaagaaatatgaaataaacaagcaaattgaaagtgttttacttatgttagaaccacagtggtcggcaaaaaatataacacttgatatttctcttgaagaaactatcatatgtggggatgaagatttattaagtcaggtatttataaatttgcttaataatgctattaaatttacgccagaaaacggaaatataggtgttaacttatataacaatgaagacggggtcgaatgtaaagtctccgatacaggtataggtatttcatcggaagatcaaccgcggattttcgagaggttttataaagcagataaagctcgtaatcgttctttgggtggaaacggacttggactttcaatagtaaaaaagattattgacttacatggagggaaaatatctcttacaagtgaaattggaaaaggtacagaatttattatttggctgcctaaggtatatgaaagaaaataacaagtcctaatattcaggcagattgacttgttatttttttgataatgcgcaaatagaagctaaatatgttcattattacagtctgaattaacagactgtaattttttgtttacattgagtttaagttccatttaagtttagtttaaattgcagacatatactatgttttgtagaagccaaacgggctttagaaataatattattgttaaggcaaattttattacttaaatacaatgcgaaaggagttttttatatggaaaacacagaaaatatagatgaaaaatcactctactatcttgaaaaggcacctgttacaaaagcaataatacacatggctactcctatgatactaagtagtatcgcatcagttgtatataatatcatcgatgctttttttgttggtaaacttaataatactgcaatgatggcggcagtgatactggcattaccattttcattagtattaatggcaattggacaaatgtttggagtaggttctggaacatatatatcaagacttttaggtgaaggcaatacagacaatacccgaaaagttagttctattaacttttggtcatcaatgcttatgggtattattcttatgatgatatgtctgccttttttatcctctattttgccgcttttaggagcaagtggcgaaacgttacaatatacaagaaattttattatggtacttgttattggagctccaattatcattgttaatatggcgcttgacgcatctgtacgtgcagagggtgcatccactatttctatgactggtaccatagcaggtattattattaatataatacttaatccctttttcattttcgttctaaatatgaatgttatgggatcagcactagcctctgtttgtggtaatatagtttccgttttgtattttatatattatttgcaaaagaagagtactgttcagagcttgtcaattaaggactttaaaccaagtaaagaaatttatggtgagatttttaaggttggagtttcagctttattaatgagtggattttttgttatcataagcctgctattcaataattattctatgatttatggagatagtgttgtggcgggatttggaattgcacaaagagttgtccaaattgtagattgtattggtatgggctttgcaatgggagttgtaccactaattgcatttgcttactctgcaaataaccaaaagcgtctcatggaaattgttaagaaaactatattgtatatgcttggtttaacattaactttaggagcagttctatttgcactcaggttacagattattggcatcttcagtattgatcctaatgttattgccattggtcaaataacccttatagctcaactttcctcaactgtttttgctgccctatgtgaattttttactggaatttttcaagctcaaggtgatggtgtgaaatcaaatattatggccgctgtgaggggtgttttatttgtccctattctgattgtaggaaacttactatttactgttaatggtgttatttgggctatgacagctacagaaggactctcatgtctaataggaattgctttatggcttggaattagacgaaaaagtttactagaaatctctatgaataaacagataagttaaattaaacataactttttagcctaagcgaagatgagcggaatggtggatttagaattcagatagtggttatgaaagtatgctttattaagcactaaagggacttttctgaatataattagttaaaaatcttctgactgtgggtttatatagtcagaagatttattttttaacatatttttaagataaataggaattaatttatcttgaaataaaaagagcccctaaagttaagggcctagtgaataggttagaacaaaaaaagactatgaatggagagtaactaaatgagaaacaaataacattcaagaggtttcttttaattatattaaggttggcttcaaataattctaaatagtaataaataattcttcgcgcttcaattaaggagtaaaaaatatagcttattgctaagcatattaaggaaaataattattatgaaaagtttaaaacttagtgaaatgtaatgataatgattgtataaaaagtagatagatgctaattaggataataatctatggaagtttaacaatactacattaacaataaacgttagataagcaaaataaagtttttatttaaaagtacgatatatttaatgttaaatttaatattgaattggcaaagcagttgaaaaactgtgacgcaaagctagagggccttttccttttgaaaggatggcagccagttgcaagtctttgcctatttgaaatgaataggaggaaaatgaaatgaatgacaaaattttaatttgtgatgatgctagatttatgagagttactttaaagaattccttagaaaaagagggatatcaagtagttgacgaggcagaaaatggagaagtgttgattgaaaaatataagcaattaaatcctgatttaatactaatggatattacaatgcctgtaatggatggaattagtgcactatcatcaattatggagattaatcctaatgcgaaggtgattatatgttctgcaatgggacaaggagatatcgttatcaaagcgataaaaactggagccaaagatttcattgttaaaccatttagaaatgaaagattaatacaatcagtcagaagagttttggaaaactgatttcccaatgtacatatttaaggtaaatatcacgctaacgtatcacattgtttataaataagagtgtgattttttattatgtaatgcaaaagatttgaaaaaactagtatagagcatactagtttttttcggttaaattagtttacatgctgcctaatattttgagtttattgggacaaatttatatcgtttaatactattaatttattagttattttcttttaacaatatattaagaaatgattaatatatttgacaaagaactgacaagaaaaaataatagtatattcataaggaagggagtttgatatttatgttaagagaaattgaagaattaaaaattaaagataaaattacaatagaagacaaacaaatgcttagaaaagcactagatggaataaagggatggaagtttaatccggttgcagtaattacaaatggaattgaagattattattttatatgtagagtaaaaacagtaataaaagatttacaaatgaagatggcaaaagtatatattaaaatacaagaggggagtaaccctagactgttagcaatagaagagatatagtaattcagatacatgaataagtaaaaatgacaataaatttatatctataatgtatagaaaagtaatttctaagtaaaaactggagatgagattagtaaataaagatgtaaatcagatattacaatatcagaagtttttcgagataggctatgttataaaactagtcctatcttatttttatgtgtattttgggaagacttataatttgtaaatagatattgcagcttaataaagttttttattactaattcacttagtataaaagtagagaatacatgaattgtaaaaagctttgtcattaaaagctaaagtagtttttattagagataatttattaatgacaatgctttctatatgaaagattaaaatatgttgattaggaagctaatgatttttctaagttctttataaaagtattaaattcatcaggttgacgtttacctaaaagtaaagaagttaatgcagaatttatttttccaaatatgtttctatcactttctatctcagtaaaaatgagtttagtctcattttcagaaataggaataagttgatatctagttataaaggattctcttctatttctagcagttatttcgtagattttatctctttcaaatgcagttatttcaaccctaaatcttttattcttcttttgcttagaataggttccaacagctcttttttctttaaagtcaggaaagtttgcctttgcagattttacaaaagtattaaatattttcttacaagaatgattaattatagattcggtagtaaatgttttcaaattgaataccccctatgcaactaaattataataccaattatatactataaaattcaattttcaagttaacattagatcaaaattatatagttaagtgatattatagtaaaattataataacttctatatcattaattctaaatatacattttgttaattacttactatacaaaatgtatatttgattaaaatgtaaagggtttaataaatgctagtaaatacaatgcttaggataaaattacaaaaaagaattaagtatggcatggaagttgctatatttaatttgcgagaggagatattattatggatttagaaaacaaacttataaacatcattaataccgaaaataaaaaaaatccactaactgatgttcaaatggctaaattcttgggtgtggctagagaatcaataaccaatttaagaaaagaattaaacatagcaaactctaggcaaaggagatatccatatttaaaggtggcaacatcaactatattaaaaaaaaataaagacattgcagtatctgagcttactagagaactattggccgaaggatttgatgtttcaagaagaattgttgaagaaatattagaaaaagataattttgaagttaataaagttaaagttgaaaaagaggaagtaacagatccttttgattgcctaattggaagtaatggaagtttgaaaaattctatagaacaagctaaatcagcaattttatatccgcctagaggacttacaacattaatagtcggagaaagtggagttggtaaaagtaaattttctgaatgcatgtatgaatttgcaaagaaaaagaaggttataaaagaaaacgcttcgtttgttgtattcaattgtgctgattatggtgataatccacaattattattatcactcttatttggacataaaaaaggtgcatttacaggcgcagattcggatgcatctggattagtagaagaagcaaatggaggagtactttttttagacgagattcataggttacctccaaaaggtcaagaaatactcttctctattatggatagaggaaaatttagaagattgggtgaagccaattcagaaagaaaagttaatttaatgttgattggagcaactactgaaaatgtagaagctaatttactattaacatttagaagaaggataccaatggtaataaaaattccttctctgcatgaaagatcaataagagagaagattgatatcatctataatgaatttcaagcagaatgtaatagaatagatgctaaaatttttgttgataaaaaagtagtagaaatactcgctctaaaaaagtttagtgctaatattggtcaattgcagaatatgattcaggttttatgcgcaagagcttttatgactttcataaataaggaagatataaataaagaatcattgataatagatatgaatcaaatattaaagataaatgactcgtttcaagatataaaatttcaggatattaatagagcagagatacgaaaatatgtaaaggattctatatttattccatttatgttggaaaatcaattaagagaagaatcaacagaagttagtgaaagcgcatttccagaggatatatataggcagattgaaagaaaatattacgaacttaagaagatagatatacaagaagcagatattgaaagtattctctgggcatttatacaaaatagttttacaaatatagaaactacttttaattatgaaaaatcattttctatgaatgatttaagaagctttgtaagtgaagatttattagattttatagaaacttttatggaagaactaattaaagagaatccatcattagaaataaataaaaatgtatttaaatacttagctatccatgtagaggaaagcattaaaaggataaggttaaaacaaaagataataaatgtagataaaattataagcgatacaacttatgaatatgaagtagctaaaagatttgctatgggagttgaaaaaataaaagacatagaaatacctaatgatgaaattatatttataggactgtatataaaagcagcactaaaatctgaaaataaaagagataaagttggattaatgataatttctcatggaaaaatagctactgctataactaatgtagttaaggaacttttaggaataagatttcctgtagcaatagacatgcctttagatgagaatccaatcaatatatataacaaggtagttgaactatcaaaaataatagatcagggaaaaggcgtgctcttcttagtagatatgggttcattaaataatataggagatatagttaataaaagaactggaataaaatcaaggacaatggatagggtagaccttataatcgcattagaagcagctagaaagatttcaataggagaagggaatcttgatgaaatatacttttctttaatgaaggatagactcggacatagatattttatggaaagtgtatcagataaaccaaaagcaataatttcattatgtctaacgggtgagggaatggctaaatatataagtaagaatttaatggataaatatagtgatgtaaacttctatgaaatgagtgcactagatgaagaattatcaaacaagatagttaaattaaaagaagataataatatattagcggtcataggaactatggatccagaaatacagggaataaatttcataccgtatgataaagaaatcttaaataatttaaatatagattcattagtaaataaaagtgaagaactaaaaaaatatgaaaggattatagatgaagatttattgatatttgaaccagatatatatttcaaaaaggatttattggagtatgtttgctcaatacttataaataatggaagtgtagataaagagtatttatcatctgttgttaatagggaaaatttagctccaacatatctaaagggagaaatagctgttccacatggagagtcttcatacgtaaacaagacaagctttgtatttatcaagttaaaaagtccaattgattggggggttggaaatgtaaatataatatttatgccagtttttaaagcaaatgataaggtaattgtaaaaaacacactaaaaattttagaggataagattttcatagaaaatatgaagaatagtttaactgagttggaatttaaaaatataattttaaacaagtttaaagaaatataacaaatagggggaataacaatgaattcagatttaattgcattaaatttagaagtaaaaaacaaagaagaggtcatacaggaattaggaaagagaatgtttgaaaaggggtatgttaagtctacttacatagatgctgttctagaaagagaaaagacgctgcctacaggacttgatatcggagaaatgtgtgtagcaatcccgcatacagattctaagcatgtaaatgaatctaatgtagcactagctgttctaaagaatccagtagagtttagaaatatgatagatcctagcaaaagagttgaagtaatggttgtatttttattagctataaacgatcctgattctcaggtaactttgctaagcaaactaatgtcagtttttcaaaatgtggagttattaaagcagataaagagttcatcatctacagaggaagtaacaaaattattagaatgtataggaatatagtacttgaaattataaaagattttaagtttatataataaatttttgggaggaatatattatgaaaaatgtcaacgtattatcagtttgtggctcaggtacagtaacatcgtctatggtcgcaggaaaagttaaagaaacattaaaggaaaaaggaataagctcttctacaacagaagcaagaccaacagaagcattaaatttagcacagtcaggaaggtttgattttattgtttacacaagtccactaccacctggggattataagataccaactatcaatgcatttgcatgtcttacaggaataggagaagataagttttttgaagacgtattcaaaacagtagacgaactaaataaatagtaaaatattattaataatgggggaattaaatatgttagcatttcttaaatcaataattgacacatttggatcagcaataatagttccgtttattatatttgtaatagcaaaagttttcagaatatcaactaataaatcatttctttcggctatatatgctggtgttgccttgcagggcttttcactaatattgaattcatttacaccaatagtaacaccagttattaatagaatggttgaaagtacaggagtaaaccgtccagtgtttgacgtaggatggcaagctacatcgctagttgctttctcttcaagtgcaggtatgatatatcttggattaggaattctattgcagactgtattatttctaataaagtggacagatgtttttcaaccatcagatttgtggaataattactcatacatggtttggggagctatggttataggggtaacaggaagcttccctttaggaatagcatgtatggttttgttaaatttatacagcttactaatatcagaattagtagcaagaagatggtcaaattattacagatatccgaattgtacaataatagctatgcataatgtagaagcatcaatatttgcagttgctatagatccaatatataacgcattaggatttaataagattaaactgaatccacaacaattagaaaagaaactaggattctttggtgaacctatgacgctaggattatttttaggaatgtttataggtatattaggtaatgtggcaagaataggaactatggaggcatggggagaaatattaaaattaggcattgcaactagtgcagtcatggctattttccctaaagttgctagtatgtttgcacaagcattttcacctataacagatggagcaaggaaattcatgcaaaaccaaggaaatcgtgattggtttatagcagtaaacgatgcagtaggatatggtgaaccagcaacattgatatcagggttaatattaataccatttatgcttgtattagcaatgatacttccaggaaatcaagtattacctgtagttgatttacttgcacttccatatatggttcaaggtttagtggctgtatataacggaaatatatttaaagttttactttcaggcataatatggttcggattagggttatatgtatgcacatttacagcgccattgttcacatcgatggcagttggtgtaggtgtagctataccagcaggtgctatgatgattacaagctttaatatactaggaaaacctttaatgggattagtattttttgcattcttaacaggaaatccagtgtttattgcaattgcggtggcagtatatattgctttatgggcattgtttaagaagaataaaaatgcaattgttgactatttagaaagacaagctgtgaagaatataggggaagatggggcaactccgagcatggcaagttaatatagaaaaataaattaagtgaaaggtattctgtttagtagatagtaatagttgatctactgatcaggatacttttttattctttaggaatttatatttcagtaaaatctatggaagatgtactccttgagggtataacttaaagaagtttgattgaatagtttttatatttaaaaaagaatagaaaagaaatcttattcgctttaataaagataggtcacaataaaaccatatgattttacaatttatcataatgtaatgagttttataaaatgtaatataaatgaatttaacactttaaatataaggcatataaagaaattaaaattacttttttgtatggcacggaaattgctttatatattttcagaaagatagaaaggggatgtttatagtgacaaataaaatgaaagcttcattattgtatggaataggagatgttagatatgaaattgtagatataccaaaaatttcatctaatgaagtgctagtaaaagttaaaaatgtaggtatatgtggttcagatctaccaagaagtatggtaagtggacttagtggaggagcaaaatatccgattatattaggtcatgagttttcaggtgaaataagtggggtaggatcggatgtaaaaaatattcaaataggagatagagttgcagtcgcacctttagttccttgcggaaaatgcatttactgtaaatctggagactatggattatgtactgattatcacattattggaacaagagtaaatggagctttagctgaatatgtcaaagtgccagcggatcatatattaaaattaccagatagtttagattttgaaactgctgccggaatcgaaccagcaactatagcataccatggactagcaaaagcaggtattaaggttggtgacagtgtagtagttttaggatgtgggccaataggtcaatttgctatacaatgggctaaggttttcggagcatctaaaattatagcagtagatatttttaatgaaaaattggagcttgctaaaaagttaggagctaattattcagtcaattcaaaggaatctgatgtcgtggccgaaattaaaaagattacaagtggtggagctgatgcggtaatagagacagcaggaagcaaatttactcaagaacaagctttacttatttctaaaaagaaaggaaatgtggtatttgtaggaatatctcatacaccactaccattaagtgaatcagcaacagaaagtatattaagaggagaattaaaaattcagggatcttggaattcttacacacagccatatccagggaatgcttggcatgcaaccgttgactttatgggaaaaggagagattgtatttaaacctatgatttcccataagataaaacttgaagaggttggagaatatttaaagaagatggtaaatagagaaattaatttcaataaagtagtagtagaaatataggtggtgaatagttatgaaagaaaatttaaagaaaatatctaatagcattagaatgaacataattaaaagtgtatcagcagcaaaatcaggtcatccaggtggatcattatcaattgcagatattttaactgttttatattttgaaaagatgaatattgatcctaaaaatcccaaagacccaaatagagatagatttgtattatcaaaggggcattcagcaccagcattgtattgcacattagcagaaagagggtacttccctaaagaagagcttttgggattaagaaaatatgaatcaaatttgcaagggcatcctgatatgaaaaaggtaataggagtagatatgtccacaggctcactaggacaaggactatcagcagcaaatggaatggctttagcaggaaagctagatgaaagttcttacagagtctatgcaatacttggagatggagaagcacaagaagggcaaatatgggaagctgcaatgagtgctgcacactataaacttgataacttaactgcttttcttgatttaaacggattgcaaatagatggatctaatgaagaaataatgagtataagtccgattgacgagaagttcaaatcatttggatggaatgttgtaactatagatggacattgttttgaagatataagtaaagccatagatgatgctaatgctacaaaaggtaaaccaacaattataatttgtaaaacaattaaaggcaaaggtgtttcatttatggaaaataacgttaattggcatggatcggcaccaaataaagaagaaactgaaaaggcactagctgaattagaaggaggggaaaaataatgggagtagcaacaagagaagcgtatggacaagcattaaaggagctagcattagataataatgttgttgtattagaagcagatttaggaaaagcaactaaaagcattgagtttaagaaaattgcaccagaaagatattttgatatgggaatatctgaaggagatatgattggaactgcggcaggtcttgctacatgtggaaaaataccatttgcaagtacgtttgctatgtttgcagcaggaagagcatttgagcagataagaaattcagtagcatatcctaaactaaatgttaagatagtggcaacccatgcaggtataactgttggtgaagatggtggaagtcatcaagcaatagaggacatatctttaatgagaagcattcctaatatggttgtattaagtccagcagatgttattgaagcaaaaaaagcaatatttgcagcgaaagaatacaatggaccagtatatataagattaggaagagcagcaactccagaaatacacactgaagattatgaatttaatattggaaaaggtgaagtattaagaaatggtgatgatgtggctataattgcaacgggaataatggtagcaaaagctttggatgcggctcaaatattaagtgaacaaggcattaatgcaacggttgttaatatttcaactataaagccatttgatagtagcttaattgttgaggttgcaaaaagagttggtaaaatcgtaacagtagaagaacatagcataattggagggttaggttcaactgttgcagaggctttaattgaagagtacccagtaaaaataaaaagaattggtataaatgatgagttcggaagatcaggaaatgctgaagttttattagaaaaatataatttaacagcagaacatatagttgaaacagtaaaatcaatttaaaggcagggatataatatggaagttaaattatcaccttcaatattaggagcaaattttttaaaactcgaagaaactatagtaaaacttaaaaagcagggaattaaagaattacacatagatataatggatggacattttgtacctaatattgcttttggaatagatcaaattaagatgattaaacaaattgcttgtgatatagaattagatgtacacctaatggtaacaaatccagagatattcattgatgcgttagttgaagctggtgcgaatacaataacaatacatcaagaatcttctccacatatatataacttaatgtatataattaagagttttgggataaaagttggggtagcgttaaatccggcaacaccaataaatacattgaaacatataagtcatatggtaaataaaatattaataatgactgtagaaccaggatttggaggacaaagcttcattgagcctatgatggaaaagattaatgaagtgagtaatttcataaaaagtgaaaatatagaatgtgagcttcaggttgatggaggaataaatttagagaacataggtaaagttgttgaaaatggagcaactaatatagtagttggatcagcaatatttagagaagaggatattgattcaacaataaaaagatttagggaagcaatactttaactaagcttataaagtgaaggagctgaaatacatgatagcaataggggcagaccatggaggatataaattaaaagaatttatcaagggatatttagataaaaactcagtagaatatatcgatgttggcacattttcagaagacagtatagattatcctcagatagctatggatgtagcaaatagggtatctataggagattgtgaaaagggaatactttgttgtggaactggtattggaatgtctattgtagcaaacaaaataaaaggtgtaagagcagcattagttggagattgttttactgcgaaagctaccagagagcataatgattctaatgtactttgtttaggtggaagagtaattggcgaagaattagctttaatgatagtagatatttggttatccacagagtttataggtaagcatcatgttaatagactcaatcaaataaaagaaatagaagaaaaatttaaataatatattaattaggagagtgattattaatgttagaagaattaaagaaacaagttttaaaggcaaatttagaattaccagcaaagaaacttataacttatacatggggaaatgttagtgggattgatagaagtactggattagtggtaataaaaccaagtggtgttgagtatgataatatgactttagaagatttagtagttgtagacttagaaggaaacgtagttgaaggtagtttaaagccttcatcagatacaccaacacatttagaactatataaagagtttgatgaaataggtggaattgttcatacacattcaacttgggctactatatgggcgcaaataggaagagctataccagcttgtggaacaacacacgcagattatttttatggaagtataccatgcacaaggaaaatgactaaggaagaaataagtagagcttatgaaaaggaaacaggaacagttataattgaagaaataacaggaaacaatccgttacactgtccaggtgtagttgtaaatgatcatggtccatttgcatggggaaaaaatgcagaagaagctgttcataatgccgtagttatggaagaagttgcgaagatggcatatttcactgaattgttgagtccagacaatattatggacaagatgcttatgaataagcactttttaagaaaacatggtaaaaatgcttactatggacaaagcaagtaacttcctttaaaagcaagataggagaatatgcttattttcctatctttttatctaggttatagatatatggaattaaagaagtatccttttttgcggggaaattatgcatggacaaaaatggggagggtttattatgctgcaagaacttaaaagactacaaagtggaacggatataaggggaatagctatagaacatgaaggaactaaaaatcttacgcctaatttagtcaataatgtgggatttggttttgtagagtggcttaaaaaaactaaaggactcagtagtaaaaatataaaaatagcagttggcatggattcaaggttatctggaccagaattgaagaaatcattaatagaagctttagttgattctggttgcaatgtttatgattgtggaatatgtacgactcctgcaatgtttatgacaactatattagagaattattcatgcgatggagctgtaatgataacagcaagtcatcttccgtattattataatggattgaagttttttactaaagaaggtggatgcgaaaaagaagatattgaaaacataattgaatgttctaacttagcagaaaagaaatgtactactaaagggctagttgaaacaatctatttcatagatgtttattcaaatatattagttgataagatacgaaagaatgtaaattcaaaaacaaattatgagagacctttagagggaaccaaaataattgtagatgcaggaaacggagcaggtggtttttttgcatataaagttctagagaaattaggtgcgagtgttgagggaagtcaatttacagaaccggatggaaatttccctaaccatattcctaatccagaaaatgaagaagctatgaattctataaaagaagcagtacttaataataaagctgatttaggaataatttttgatacagatgtagacagagcggctatagttagtagtgatggaaaagaaataaataaaaatgcacttatagcattgatatcttcaatagtgctagaggaaaatccaaattcaattatcgttacagattcagtaacctctactggactttcagattttataactagtttaggtggcatccatcatagatttaaaagaggctataagaatgtaataaatgaatctaaaagattaaataaagaaggaaagttaagctgtttagcaatagaaacatcaggacacgcagctttaaaagaaaattactttttagatgacggggcatatttaatagccaaaatactaattaagatggccaagttaaaagatgaaggaaaagaaatatcaagccttatagaaaatttaaaatatcctaaggaaagtatggatatgagaataaacataaagagggaagattttaaatcatatggagaaatgataatagaaggtttgaagaaatatgtagatcatgtgaatggatggactattgaacctaaaaattatgaaggaataaagataaattgcgataaagaaaatggagatggctggttattgttaagattatcgctgcatgagcctgtgctgccattaaatatagaatcagattctgaaaactccattaataaaatattagaaagattaatgccatttttaagaaaatatgaagatttgaacttagataactttagcaatatatttgaagtacaattaaaaaaataataagggcattttggacttgttattttctttcatatgccttaaatgatttttgattggagtgattgtattgaagatagcagcctcaataatgtgcgcgaatcaattagaacttcatagtgaactaaaaaaattagaagatgcaaaggttgatttattacattgcgatgtaatggatggagtttttgttaacaatttagctatgggaccttatgtattggaacaaataaaaagtgttaccaatattcctctagacatacacttggcaactgtagacacactgaaatatatagatatgtatagctatctaaatccagaatatatcatttcatattgaagcaagtaaagatgtagaaatagatataaagaaggttaaatcaaaaggaataaaagcatcaattgctataagtccagaaacgtcattagaacgcgtaaaaccatatttacaggatatagatatgattcttgttatgactgttaatcctggtttttcaggacaaaagtttaattataaagttattgataagttagatgaattaaataaatatttatcaacacttagtaatagaccattaatagaagttgatggatgcataaataaagagacagttaaggaattaaaacataaacaaatagatgtttatgttttaggtacatctgcattatttaacaataaaatagaggattataaatctaagataaatgaaataaaagaaattaaataataattttcgccagtatttaagtataaaccaataatcacatacaagaatattaaatagtataatcatgctttcacaattttaaatttttattaaaactgctacagagaaatttttgtagcagtctttttttcataaagatatttatatatgttgctataataaatttacaattaggcctatagtaagctaagcgttaaaataagattgtaatttaggaaattgagtgtaatatatatttacggggtgtaaagagaaaaatttatattaaagagagattataatatttaaatttgaaggaatataaaaatattatataggcaaaagtacatgtagtaattaaaataatattatgaagatatattgcattacataagatacggggaggaaatacaatgttaaagataggttgccatttatcggcttcaaaaggattcaagaatatgggagaagaggctattagtataggcggaaatacatttcaattttttactagaaatccaagaggtagtaaagcaaagactatagatgaaacagatataaaagaatttttaaagttagcagaagaaaataatttctctaaaatattaggtcatgcaccatatacattaaatgcttgctctgcagatgagaacacaagaaattttgcagtagagataatgaaggatgatttagaaaggatggagtatattcctaataatctttataattttcatccaggcagtcatgttaagcaaggtgtggagattggaattaaatatatttcagatatgctaaatacagttcttaagccagaacaaacaactactgtattgctcgaaacaatggcaggaaagggcacagaaattggacgcacatttgatgaattaaaagagattttaaataatgtagaattatcacataaagtaggtgtttgtcttgatacatgtcatgtccatgatgcagggtatgatattgttaataatttagataaagtagtggaacaatttgataagataattgggttagataaattatgtgcaatacatttaaatgatagtatgaatccatttggaagtcataaagacaggcatcaaaaaataggagaaggttctattggattagagggaattaagaatattattaatcatccaatgttgtgcaatttaccatttttccttgagacaccaaatgagcttgacggatatgcaagggaaataaaattattaaagagtatataccaaaattaaaaatatttagtgataaaattatagactgtgtgtagcgtaattttactaatcaaattgcatgatgaataaaaaataataatatagtaatattacttctataataaatattaagtaatatagagaattatgatatacttaagctgtcaaaatatacataaaaggtggaaaaagttatgaggattacgaagaagaaaagttttgtttttataacaattataatgggaatatttttattggtaggttgcggaaataaaaatgctagcaatggaaaaggggaagcagataattcctctaaaacaagtgaaagcaatgaggcaactccatcagcaaatagtaaggacctgccaatagctactataaaagtagaaggattcggagaaattcaagctgaattatatccagaaattgctccaaatactgttaacaactttatatatttagcaaataaaggcttttataacaatttgaaattccatagagtaattaaaggatttatgatccaaggaggagatcctcaaggaaatggaaccggtgggccaggttattcaattgaaggtgaatttacttctaatggttttgcaaacagtttaaagcatacaaaaggagtattatctatggcaagagcacaagaccctaacagtgcaggaagtcaattttttataatgtcaggagatgcaccaaatcttgatggagaatatgctgcttttggaaaagtaatatcagggttagatatagtagataaaattcaaaatgtagaaactagttctgctgatgcacctaaaaaggatgttgtaattacatcaataactgttgatacaaaaggtgttgaatacaaagaacctaataaaaagtaaatttaaaatgtagcttagaatctaagaataaatgatttagtggagacttatatgactaatatcaatcatataagtctccactaaaattttatcaggcatttattggatagcttgagtaatggagtttattttatcactgggatgcttattccaattatttttccaagatttaatacattcatataggattataattaacatagcaagtattataactgataacacggttaatgtagtcttaccatttggaatatagttattaaagatattttcaatagaagctgttgaagttgttatagcgataaatatcataggtaatattgttataggggtatatttcttcttgcccatctctataagtacagaagttccgattgcaaaagcaattgcggcaagagtttgattggcgactccaaatagaggccaaatagttgaaatgttaccactataaagtaaggctccccagctaagtgacattaatgcactgaaaaatactagattaaatttagaatcttttttagcaagtggtttgtacattttgccaaaaagatcttgtaataaatatcttcctattcttgttcctgaatctatagttgttaaaataaataatgcttcaaacattatacagaaatgataccaataagacattaaggttgatgcaccaggtagcttttggaatacatatgtcataccaacggctagagacacagatccaccaggccttccagcaagtttctcaccaacaagtgattcgagcattcctaaatcttttgggaccaaatttaatttatcaaaaacttctggcaaagagtttatggcaaaatagtcagctgtaggcaatgaggtagctgcaatcaatgccattagggagacaaaagcctcaagtaacatagaaccataacctattggaagaatatctttttcgctctttattagttttggagtagttccagtgctaataagtgaatggaacccagatagcgcaccacaggctattgttatgaataaaaacggaaatactttaccgctaacaaccggaccaccaccatgaacgtattgagttagtgcaggcatttctaaatttggtctgactattattataccgataactaaagcaccaataactccaagtttcatataagtacttagataatcacgaggtaataataataaccatacaggcaaagccgcagcacagaatccatagattactaatattacagatagttgtttagtatcaagagtcaaaaaattaccaagagttgtaccttcaatttgtggcccaaagatgaccgcaagcattattaaagccatacctattatagtagcctcacctattttactaggtctaatgtattttaaataaattcctataaaaattgcaattggaatagtagccccaactgtaaatgtaccccaagggctattataaagcgagttaacgactggcaagccaagacctgccattgtaattattaatatgaagataactgaaatggaagtaataaagccaattctttttcctaatgtatgctttgcaatttctgctatggactcaccattaaacctaactgatgagaaaagcattatcatgtcatgaactgcacctgcagcaacggaaccaatcaatatccagagagtaccaggaaggtaaccaaactgggcggctaaaacgggtccgataagaggaccagctcctgcaatagccgcaaagtgatgacctagcagaacccacttatttgttggaacataatccttgccatcattgtatatttctgaaggaacttttttagattcgtctaaaaccaatacctttgcagcaatgaaagcaccgtagaatctgtatgatagtattagaattaaagcaccaatgataactaaaacaatagaattcatatctacatcccctttgtgtaaatgttttcttacatatataatctaacattataaataaatagtgactatattttgtatgtgaaatgctatattcagtggatgaattaacaaaatattgaggcggtttgcagtaagtttttatataaaggaagtgaaaaattgagattttattacatagtagtataatttatgtatatagaggtgaaagggaggtgatagtatgttgatggtgaatatgctagagagaatggcacttataacaatatttatatatgtaatattacagactaatattatgaagtgtttcgttaaggacaagtttgatagaaaagataacataatgatgattctgatattttcactccttgctattttaggaacttattttggaatatatataaaagatcaatcattagcaaatagcagaccagttggagcaatagttgcaggatatttagggggacctgttattggaattatagttggatttataagtggattgcataggtattcatttggaggatttacggcgttagcttgcggattatcaacaattgtagaaggcgcaataggtggaggatttagaatattatttaagaaaaaggggctaaacccagctgttgcagggttagcagcagtagtagcagaaattactcaaatgataattatattaatgttttctaaagatataaattcagcaatagatcttgagaaaacaatagcattatctatgatacttataaattctattggtgtatttttaatagttatggtaattgaaagctcaaaaaaattggttgatggtgaagtaaaacttataaaattaaaagaagaaaataaagtagcagaattaaaggctttaaaagcacaaatagagcctcattttttatttaattctcttaatgtgataagtgcatattgtagaactgatggagaaaaggcaagagaacttatattaaatctttcaaattattttagagctacgctagaaatagaaggggatttttctacattaaaaaaagaattggctttgataaaggcttatgtagcaattgaacaagctagattctcaaatagactagaagtgaaatttttaatagatgataatttactagatataaaattcccaatacttgtacttcagccaattgtggaaaattcaattaagcacggaatactgaaaaaaattaatggtggtatagtaacaatttctattagaaatgatgaaaatgacgttagtattgaaattagtgataatggggtaggctttgaaaatgcagatgaatctttatcaactggacttggccttaaaaatatcaacaatagacttagattattatatggagaaagttactctttaaatatagtaagttcaaataatggaagtagtgttaattttaacattccaaaataattattataattaatggggggaattaaattgaaattactagatgagataaaagtagcaatagttgaggatgaagcaatatccagcgatgaattaaaatacataatatctaaggatggcagattcaaagttgtagggcaagcatatgatggaataagtgcattaactttaattgaaagcgaggagccagatattgcttttattgatattaatattccgggaaaaaacggaataaaattggcagaagatgtaaaagagatatttccggatataattctaatttttttaacggcatatgatacttatgcaataagggcttttgaacttaaagtttatgattatatactaaagccatatgatgaaaagagaatagaggaatcattaaattgtgcgttaaatacaattagtaatagaaatgaaaatgaaataatcaatatattaagtaagcttgaaaataaacaagcattgaaaaaaatcccgtgtgagaacaatggaaaaataattcttatcgatgttaacaaaatttccttcttttattcagagggagagaggaattatgttaagactaataaagatatttattgtacaacaaaaactttacaagagctaacggagaaaacaaatttttttagatgccacaggagttacgtagtaaatcttgaaaaagttaaagaagtttacccttggtttaacggtacttataagttaattattgatgatgatgaaaataatgaaataccggtgagcagatctcatgttaaggaaataaagattattttaggactatagtactagctccagttttagaagtatataaattttagaagaatattaattaaaattaagtttttaaattaaaaaatcagatgaattttttgaataaaatatcaatttattcatttgtaatttatgaaaaagtctaaataaaggataatctttgtatgcaatcttaccaagattaacaatgagtatcctttatttggattaattattatataaagttctgtattatctcagttatacagtctttttgcaggcgcaattataaaaattaattttgtaattaattttatcaagatttctttgtaattcagctatttggctaataacttcttcacggtgttttataaatatttctctacgaacatcaatagtattatcacctttaaggcataactggatatattctttgatttgctttataggcatacctgtattttttaaacaacaaataagttcaagcaattctaaatctttttctttaaaatccctgttgcctgactcactgcgatccacaaatggaagtaaaccttctttttcataatatctaagagtgtgtggacttaaatgtgttttttcagcaacttcagcaatactgtatcccatagtattaccctcctttaaactgcatgatgtattttataacttagagtatactctaagagtaagcatttgtaaaattgcatcaaaaaattgtttctaaaatgaaaagttataaatcatgaatatggtattataaataaaaattactttttaattttagaacaatgactttagtgctgcaataacgaaattaacttttcattttagcgtttatttttccaaaatatgttgacttagagttaactataagatgtaaaatatatatagaacaatttatcatataaattatctattttaaggaggaattactttgttatatagagggtttggaaagacaaatgaaaaggtttcagttctaggatttggttgtatgaggttacctattattgatggagatactactaaaattgacgaagaaaaagctacaaaaatgattcgccacgcaattgatgaaggagttaattatattgatactgcatacccttaccatggaacaggaatgggaaatggaggggaaagtgaaccatttgtaggtagagccttaaaagagggatatagagaaaaggtgaatttagctacaaaacttcctagttgggcaattaagactagagaggatatggataaatatttaaatgaacaattagagcgattgcaaacagatagaatagatttctatttagttcatgctttaaataaaggttcctgggaaaatttaaagaagttaggaatagatgaatttttaaactcagcaattaaagatggaagaataagatatgcaggattttcatttcatgataagttagaagtttttaaagagatagtggattattatgattggtcattctgtcaaatccaatataactatttagatgaagacttccaagccggaactgaaggcttaaaatatgcagcagatagaggtcttggagttgttatcatggagccgcttagaggtggaaaaatagttagaaatcttccggatgtagttactgatacatttgataaagcagaaattaagagatctccagccgaatgggcgctaagatgggtatggaatcatccagaggtatctgtagtactaagtggtatgaatgtaatggataatgttactgaaaatattagagtggcaggtgaagttttaccaaattcactaacagaaaaagagctagaaataatggataatgttaaaaaagcatttaaagaaagaataaaagttaattgtacagcttgcgagtattgcatgccatgtccagcaggcgtaaatattcctaagaattttacattatataatgagtataatatattcgttactccagcaacagaaaaagaacttaaggaaagatataatggagtagcaccatcagaaagagcagataaatgtgttgaatgcggtaagtgtgaaggccattgtcctcaagcaatcaagattcgtcaagaattaaaaaatgttaaaacaatatttgaataaagtaaaatattacaattcacaaaatagtttctagacagttgaaaaagatgattacattccaaaaaaagaaaaaaatgtatatattcaaaagagtattttttcgataattaagaagatataacattatatagacaaaaataaatttattaaaatcatacaaatgagttaaggagtgagctaaatgagaatattatattacgattgtttttgcggtataagtggagatatgaatctggcagcgatgttgaacttaggagttcctaaagaatatttatttaaagaaatttcaaagcttaatttaaattctgaatatgatatacaaattaacagttctgagaaacttggaataacaggaacaagagtagatgttatattaaaagatgaagtaaataattcagataacataggatataaagattttgagaattgcagtactgatattatagaagatcacagtcactctcacgtacatgatcaagagcacgatcatcataatcattctcatggtgaagatgcttcacataatcatgaacacaatcatccacatagccatgaacatgattgttcacataatcacgaacaagctcatgttcatggccattcaggaaatcacgagcatcatcatagaaacttaaaagatatagagaatataataaattctagtgacttaagtgaaaaagttaagaatttaagtttaaatatgtttatgagagtagcagaagcagaagcaaaggtacatggcaaaacattatatgaagtacactttcatgaagtaggcgccattgattcaattgttgatatagtaggagctgctatttgtttagattatttaaaagttgataagattatggcatctcatgttcaagttggtggcggattcgtaaaatgtgctcatggtctcatgccagttccagcacctgcgaccgtagaaatattaaaaggcattccaataaatgttggggtagttcaatttgaaacaactacgcctacaggagctgcgatactagctgaaaatgttcaagaatttacttcgaaaatagatttctctataaagaaaattggatatggaattggacatagagatctagatatacctaatgttttgagagtttacttaggagaagacaatagtttagagaagatagaagaacagtatatattagaaactaatatagatgatatgaacccagaattttatggatatattgaagaaaagctttttgatgcaggagcattagatgtttttaaaactcctatattcatgaaaaaaggaagaccaggaataaagttaagtgtattaattagtgaaaaaatagaaaaagatattttggacatagtttttgaagagacgacatctataggcgtaagaaaatataaagttgaaaaaataatgttaaatagagagttttcaaaggtagaaactcagtatggagaagtaacaatcaagaaatcatattataaaggtaacttagttaaatataagccggaatatgaggaatgtaaaaagattgcaaaagagaataacataactatggaaaaggtgtatagggaagtttataagcaaacttcgaatatttataatgagtaattctacaatcaaattgagaaaataaaaatgtataggtgagaggcggaatagatagatgattaataatgataaatatagtgaactagtgaaataccttaaaggattaggaaaagtagttttagcattctcagggggagtagatagcacattcttacttagagtagccaaagaagctcttggagacaatgtaaaggcagtaacgattttatcaccttacattcctaagtgggaaatagcagaggctagagaattggtaagggaattgggagttcaacatgaaattattgaggctccaattattgattcaattaaatttaatccagaggatagatgttatctttgtaaaacagctgtattcactatgatattaaatgtagcaaaagaacaaggttataattgtgtaattgatgggacaaattttgatgacataagtgattatagaccaggtcttaaagcgttaaaagaactagaagtaagaagtccgctattagagtgtaaattaactaaagcagaaataagagcattctctaaagaattgggacttaacacttgggataagccaccttatgcttgccttttgacaaggataccttatggaaatgagcttaaggtagaagattttgaaaagattgaaaatgcagaaaagtatatgatgagtataggttttagagctgttagagtacgatgtcatggtgatttagcgagagttgaagtaagcaggaatgatagaagtaaactatttaatgaagaacttttagatactattgctgaaaaaataaaagaatgtggatttaaatatgtaacattagatttgcaaggttatagagtaggaagttttaatgaaactatagtaaaaaaagaagataatcaaaataaatagtaatattttagagataaattaaaatggtgtaataaggtagtgtagaagatctcaggaggataaagctaatgaacaaagaagaaattaaagaattattagaaagtgttaaaaataacaagttgaatgtagatgaggcacttgaaaaattggaagatctaccttttaaagatttaggttttgctaaaatagataatcatagagaaattagggttggctatccggaagtaatatactgcgaaggtaagactgtagagcaggttagagatattgtaaaatttatgattacaaaaaataataatatattaggaactagagccaatgaggaaatgtataatgcagtcaaagaaatatgtgaagaagcaaaatataataaacttggtagaacaataactattaggaaaaatgaacaacctcttacggagaattatatagcaattgttgcagcagggacttcagatttacctgttgtagaagaagcatttgaaacagcgagtatattaggcaatagagttgaaaaaataactgatgttggagttgcagggatacacagacttttttcaaaactggatgtcattaggggggcaaaagtcgttatagtaattgcaggtatggaaggtgcattagcgagcgttgtaggaggacttgtagataagccagtaatagcagtgccaacaagtgttggatatggtgctaatttcggaggaattgcagctttattatctatgctgaatagttgtgctagcggtgttagcgtagttaatatagataatggcttcggggcggcatataatgctagtattattaataagctgtagttttttacaatgattttatatggttaattaatatttaaaattcagtatccaattgtttagttaggaaagaatataattaacattataaatataaaaacaaaagggaggaggaattatatgtcaaaacttttttcaaattttaaactcaaaaatttagaatttaaaaatagaatcgttatggcacctatgtgtatgtatacagctaaggaagatggaatagccactgagtggcataaaatacattatgctacaagagctttaggcggagtaggacttataatccaagaagcaactggagttgaaagtagaggaagaataagtgataaagatttaggaatatggaatgattcacaaatagagggtttaaagaagatagttgatacatgtaaaagcttaggtgcggttatgggaattcaacttggtcatgcaggtagaaagtgtgaaataaataatcttgagattataggacctagtgctgaagcatttagtagtgaatataaagttccaaaggaaatgagtaaagaagatataaatgaagtaataaatgcctttaaaagtgccgctaaaaggtgtattgaaataggatatgatattatagaaatccatggtgctcacggatacttaataaatcaatttttatctcctcttaccaacaaaagaactgatgagtatggaggaaatttagaaaatagagcgcgattcctaaaagaagtagtaaaagcggttagagaagtgtggaccaaggaaaaaccaataatacttaggataagtgctgaagattatttaaatgaaggaaatcatccagaggatttggctaaaataataaatttggttaaagaagaaggtattgatataattaatgtaagctcaggtggcgttgcaccaactcctgttccaattaaggtatatgaaggatatcagataaaatttgcagagataataaaagaaaatacaggacttcctgtaatagctggaggacttattatatcgccttatatggcagaggaaataattcaaaatgatagagcagatatgattttcttaggaagaattcttttaagaaaaccatactggccgcttgaagctgattcaaaattagatggtgaggtaaaatggcctgagcaatatgaaagaggtaagttcaggaataatagataaccatattaattggcaatagttaattttattaataattatttgaataaattttaattttaaagccagcagtataaaatgaatttaaatgtacaccataataatgaggtgatacatatggataataataaaaacagaataaaagatagacctaaatctaatgcggaacgtagaaaaatagatcctaaaaataatgcggatttaggcattattgatggaaaaaagataggtgcgcctccacataaagaaaaggatcacctataatataaagaggatatatcaaaatgtttttatctgtttgatatatcctttatattttatattaacaagtatatagatagaggaaaattaaattattaattttttataaaagcaattataatagatgatatattacataagcaaaggagactagcaaatgaaactagatttaacaatatttgaattaggaaaacttttaaagaaaatagaggataaatatgatttgaacatattagtgaaattagcattaagtggtggatgggctacaataactggcaatgctaatgttttaaagtatccaaatgattcaaactgtggctgcaatggaaaagacaacattatagatataagtgtagagcatgatggtaatgagcatggatctgtaataaaaattacaggtgctaaagataaaaagtttgatatagatatatcaagtactagatacaaagaattgcgtccaaataacttaactgttaacaaaataaaaattaacgaaaatgaaagtaaattaagaattgatgagaatataatatttacaataggtgcgtcagttgatgatataaaagaactcatagaaaactaaatatacacaacattagccagcataaaacagtccgaaatacacatactattaaagagtcaataggaagaggagagtgatataaatggacaacagtatgaaaagaaaacatacaagcaaacataagactttaaatcataatccacaggcagaaagcgtaaaagcagtttttggcgagccaaaagcgaaagattctgaatttactccaagaacttttgactaatagcagagatattaaacataggcacgattgtaaatattatataattatatttcatagtgatttctgaaatgtgaattgtataatagaccaaacaatttaatagttaaagaaggaatattttgagtataaaaaacttaaaatattccttttttagtgcaaaagaatttaatgttttaaggtataaatttgaaatattattaatttatttaataattagttattaattagaaatatcaaaatatctatatattagacaggctatagtgaaaaacaaaattattatatggatgttatttaataaagttatgaaataacactcactaagtgataaatttgtatggttattgtttaggtttttatttaataggaattaaacagtaagtatttgaaaaaagtagtcataatgtctttgtttaattgaatatattttagttataaaggaggaggagtgtttatgagtatgaactttaaagaatttatagaaacagatagagaaaagtctaacacccaaaagtttgaaggaagttttctagaatatttagatattgttaaggagaatccagaagttgttaatcttgctcataaaagaatctatgagatgattatgagcaaaggcgtagaggagttaaaaggtgaagaaaaccctcgagtaagaaaaatttatggaaatgatctaataagaaaatatggcttttttaaaaatgatttttacggaattgataaagttataatgaaacttgcaagttattttaaatcagcagccatgaaaggtgaagaatcaaggcaagtattatatcttgttggtccagtaggagcaggtaaatcttcaatagttgagagtttaaaatcagctttagaaagttgtgaaccagtttattcattaaagggatgcccaatgcatgaagaacctcttcatttaattccaaagcatttaagaccaaaatttgaggaaatgctaggagtacaaattgaaggagatttatgcccagtatgcaggtataaacttgttaatgaacttaagggagtttatgaagattttccggttgaaagaacaggattttctattagatcaagaaaaggaattggagtagttccacctgttgatcccaataatcaagatacatcaatactaacaggatcaattgatatttctaagatggatatgtactctgaagatgatccaagaattttttctctaaatggagcatttaatgtcggtaaccgtggactagtagaatttatagaggtatttaagaatgatgttgaatatcttcatacaataattactgcaacccaagaaaaatcagtaccatctccaggtaagggttcaatgatttactttgatggagttatagttgctcactcaaatgaggcagaatggaataaatttaaatcagatcatacaaatgaagcaattttagatagaattgtaaaagttgaagttccatattgcttagaactagatgaagaagttaagatatatgaaaaaataataaagaagagcaattttaaagcgcatatagcgccacatactattgaaatcgcagcgatgtttgcaatactttcaaggttaacaccttcagctaaagtagacgcggtgacaaaacttaagatttacaatggagaagagattgttgaaaaaggaactacaaagaagatcgatattggagaacttagagaagaagccggtcaatatgagggcatgaagggaataagtacaagatttatcataaaagcaatagataatgcacttgctgagtcaggatatgattgcataaatccacttagtataatggaaagtataataaaatctgttagagaactagatattgcagcagatgataaaaagaagtatttaggctttattcaggataatataagaaaagaatataataaaattcttgaaagagaaattacaaaggcatttattcactcatttagagaacaagctgagagtttatttaacaattatatagataatgctgaggcatatgtaaataagactaagataaaagatgtttcaactggtgaagaacttaatccagatgaagaatttatgagaagcatagaagagcaaataggtgtatatgccgcatcagctaaaggctttagatcagatgtgacttcatatatgttctatatagttaggaaaggcggaaaattagattatacttcttatgagcctttgaaggaagcaatagaaaagaaattaacagcttcagttaaagatttatcaagaatcataactaaatcaaaggttagggataaggaacaagcagagaaatatgattctatggttgaagaaatgaaaagaaacggatattgtcttcattgttgtgacgtaatcttaaaatatgcagctaataacttatggagggattagattagcttatggcaatatttagagattacactaacaatcaaattgatcacgacagatccatagaagatagaagaaggcataggcaacttgtagaaaaatcaataaaagaaaatttgggagatatattatcagaagagagtatagttggagagagtaaaaacaaaaaatttaagataccaattaaaggaattaaggaatatcaattcgtctatggaaagaactctaagggagtggccagtggagtaggtaacgaaaaaaggggagaaaaattaggaaatggaaataagaaattagctaaaggaaaccagggagctggaaatgaagagggtgatgatatatatgaaacagaaatcactctcgaggagctaatggactatatatctgaagatcttaatctacctaatttggatcaaaaaaagtattcagaaatagttactgaaactagcggcaagaagagaggatatcaaactcatggaataagaccaagacttgcaaaaaagaaaacagttatgtcaaagatagcaagaaaacagggaaagaagagagctttaaaggaattagaaagtgacgaagagttagaaagatttccttttagagaggaggatcttaggtactatagggttaaattaaaacctaaaaaagatagcaatgcagtaatgctatttatcatggatgcttctggttctatggatgtgactaaaaaatatttagcaagatcttattttttcgtgttggcaacttttctaaaaagaaaatataacaatatagcatttgaatttatatatcatactacagttgcaaagagagtagatgaattcgaattcttccataagtctgaatctggtggtacttatatatctagtggcattaatgaggcattaaaggtgattgaagagaagtatcctccggcagcatggaatatatatagcatatacgcaagtgatggagataactggtctgaagataatgaaaaagcagttgcagcggtaaaagatatatgtgaggttagcaatatgttcggctatgcagaacttttaccatccacatataccactacaatgtatcataagttcaaaaaagagatcactaatgaaaaatttgttcctgtaattataaaagaaaagaaggacttatgggatgcacttaagattatgcttaggaaggagttaaaggaggaataagaaattggaatatagctttaatgatattgaaaagtggaatgagaaaatagagaaaaaggttagggaatatgggctagaatgttatcctcaagaatttgaaattataggctttaatgagatgattggatatgaagcttatgttggaatgccttcaagatatccacattggagttttggtaaatcttatgagaaaagtaaaacactttattctttaaatcttactggccttccttatgaaatggttattaattcagatccttgtttagcatatttaatgaaggataatacgttattgttacagatattaacaatggcccatgtatatgggcataatgacttcttcagaaataacagattatttaaagaaggaactaatgctaaatatactttagaaatgtttaatttagatgccaaaataataagaaattatattgacgatccaagtattggatactcggaagttgaaagaatactagatgcaggtcatgcgataaggtatcaatctaaaagaactgttggagttaaggaactgactaacaatgagattaaagaaaatattttaaaagattatgaaaataaaaaagaaaatagagatattttagatccttatgaagaaatcagtttaccagatttagataagattccattggaacctgttgatgatctcatgggatttataataaattatggtcagttacaagaatggcagaaaacaatattaagaattgttaagagagaaacagaatattttattcctcaaattgaaactaaaattatgaatgaaggatgggcaagctatacacactataatattttaaaacaattagaattgccacaagaactacatttagagttcttgaaaaggcataatgatgtaatagctcctgctataggcgggttaaatccttattatgttggtttcaaagtatttgaagatattgaaaagagatacggaaaggaaaaaatatttgaagtaagagaaattgaaagagattcttcatttttacgacgttatttaactaaagaattgtgcgaagaattaaatttatttcaatataatcaaagaacttttgatgttgtcattgaagaaatttcagatgaaactggctggaaaactattagagatactttaagttatactgctggtatggggaatataccatatattagagttgttgatttgaataagaagaattatacattaaccctagaaaatgtttttgacggaagaccacttgagctttcttatgcaaaagaaacgttgaagtacgttcaagaattatgggggcatgatgttaggctaattactaaatcaagcgataagcaagaagtgattttaacttgtaatcaggaaaagaagataattgtatcctaaaagatcggaattataaaaaagtaataaacaatattttatgatttaagccaataagcatgtttcatcattatgagttaacttatgaggtaaccaaaagtataaaaatgaatagtttatatatgagagaaagtaatattttgggagacaaagatgaacttaaaaggtagtcaaactgaaagaaatttatttaaaacatttgcaggagagtctagagctagaaataaatatactttttatgctgagaaagctagggatgatggtttcctctatgttgcagaggtatttgaagcaactgcaggtaatgaaaaagctcatgcaagagaagtgtttagaagatatttagataggattaataatacaaaaaataatttgatagaatctgcacttagtgaatctgaagaaagtaaagtaatttataaagaatttgaggaaattgctagagaagaaggttttgacgacattgcagatttttataaagaacttcaagaagttgaagaacatcataaggagagatttttagatttagctaaaaaactcaaagaaggtaagatgtttaaatcagatagagaagaagaatggatatgtctaaattgtggttatatatacgaaggtaaggaagcacctatgaaatgcccattatgtagatatccaagagcatattttagaagattatgtaatgaggattgtaagtagggggaaaacatatgatttatgaatatcctgaagaatttgtggttcctgtggtttatgtagagggtttgaaagagaagcctattaacagaagtttggagtttaagtattttcagattgatgaaagtatgactcctagtgaaaagccacaagaaaataaaatgtttcagatgagcacgtaccatgatgaagatatttcaaacaaaggaatgatgtttttagatttagatgaagatttgcttcaaaaaccttaccatgaaaaatataagtttgatgatatagttgaaagtgaagaagaacattatagctctaacaatatatttaacgatatagataatgaatatgctgatggtgaaacattaagaatgtaatgtattatttgtagttagtcacttattagggattaactacaaatattttatttagatagtattaattttttataaaggattaattatgagatttaatgatttagctaaaaaacaatatgaagatatcgataatttaagtgtattattaaagaattatgtggatgtttatagactattaattgctggagcatcagaactatatggtgtaaatttagcagagaaaagtgaagttaagaaagcactagagagagttgaaaatgtaggtgaattaatagataagttgataagcactttagaacgatgcgaaggttcttatctaaagtattgcaagattaaaaatgaatatattacagtaagtacagagaaagataagatatttactgaaatagataatgaattgaattttcaaaactcagaaagagaagaataatgatgaaaactaaacaaaaaaaactctatcttgaaactttaggatagagttttttattatgaattataattaaaatttctttaatttaattttacttaccattaagtatgaaccaaggatcatcaaaagaacaacaagataaatcgatggtgtaatattaaaattaaatataattaatgaaaagaatgccataaagcaacctgctattgttattggtataccagtaaaagcgccgtcaaaatcagtagtattaaatctagctaatctataggcaccacaaattggaaatagtaataaaactataaatccaaataatcctttagggccaaaagattcaagattaaataatatatatactaatatagatggtgctactccaaatgaaaccaaatctgctaaagaatctaattctttacctaattcactagaaacgtttaaaaaacgagctattcttccatcatatctatctaccaatcctgctaataaaataaatgcacctgatattgcatacttttcattcattactgataatatagatataattccacaagataaattaataaaggtaaatacattaggaatacaacttttcctcataaaatcactcctaaaattataaaaaatacttacaaagagttattatagcacataaatgaaaataatataaggtgcaaaattaactttaagtttttattaagattatctagtatcgacattaagtaagtaaaatgatataataaactctatgacaaaggtattatatgtaaatatttataggaatttaatatatgtatttagagctaattataatcttgtatataagaattattttaaggctattttttatgtatataaataataatttaagaaaatttattggaggtaggttaatttatgaaaaaggttagattcatatacaacccatactcaggagaaaatagtataataagcgaattagacaatattataaaactacaccaagaagtaggattaatagtagtgccatatagaattcaaaaaggtaaagatttagcagaggcattagatataatagatgaaacttatagctatattttaatagctggtggagatggaacagtggattctttagtaaatgctatgaaaaataaaaacataaatatacctataggtatattaccagttggaactgcaaatgactttggaaagtttattaatatgccaaatgatatagaagaagcatgtaagcaaatattaagctcaaagccagtagctgttgacgttgggaaaataaatgagaagtattttataaatgtagcaagctcaggacttttcactgatgtatctcaaaaaactgatgtaaatttaaagaatacaataggaaagttagcctattatctaaaaggtcttgaggaattacctaactttagaaagttaaagataaaattatcatctaaagagtgtgattatgacggagaaatgtatttacttttggtttttaatggtaaaactgctggaaactttaacttagctacagaagcagaagttacagacggaaaactcgacgtaataatatttaaggctatacaaataatagagctaataccactttttataaagcttttaaaaggcgagcatttagattcggataaagtggtttattttaaaacagatgatttatatatagaatctccagaagacattgttacagatattgatggagaaagagggcctgattttccattgagggttcaatgtattaagggtggaattaaacttttaggtataaaataagatagacagtaataaatataagtaacaggaatatggaatggagcgtaattagtgaattttgcatattatttatttttgttacttataatttttttgtcaatttcacttataagaaagaatttagaggtttcaccaaagaaaataaaaatatatttggcattagtaattacattatttttattaaggcatatagcattatttttattgtgtatactcaagaatagtacaataatatattatttaaaaccgataatatttttgaatcatttatcagtgcctcttatagtgctagctgtaagctatgtttatttaagatctgagaagttaaattttggtggaacatatgttattgcagcaacagtatgtattatttatgctgtaataatgcaaacttcaaagttgacagttcaggtaaattatttatatggatttatcttacagatagataaggaaactattttatttttgttttcgctaatactacttggtgcattactcatactaaatgtaattttattggatagaccatatgcaaataaaaaaggaatatggttattaattatagcaatattaatagtaatgatagaagatattattattttaggtggaattaaaatcttcccttattcggtaattggggatatgttatttcttataattataaatttagtattaaagggctttaaaatattgccaaagaacaattatcgttcctaggaaacgaattgagtacgaatttgtgctttagagtatgtaaacagcaggtaaaatactaagataagttgttataagtgtgtagaggattttttgaatgagagtaatatgtgctaacggttaatagacagaaaggatacttagttgcaatatcaagcaactaagtatcctttcttttatatggttccttttcttctatttgaataattatcagatgaatgtttatttgagtgttttttattgctattagttgaattcttcttattattactcatagaatttttttcattagatattttactactaacatttgaatttttatttgagttattcctaggaccatcgtttgatttatgcttaccttgatagcctagttttccaggagcaaagcctattaaacagtttttactattgccaattaggtcttctctgtgagctttaagtagagctttctttactttttgataatttttaggaacagcaaactgtattagagctctttgcatttctttctcttcgggtgtttttggaatataaactttttctccggtaattgggttgaatccagtataatacattgttgttgataagcttcctggtgttgggtaaaaatcttgcacttgttcaggtgtatatcccatctctttaatgtataatgctaaatctattgctgcattaagatcagaacctggatgagatgacattaaataaggcactaaaaattgctttttatctatttgcttattaatttgaaaatacttattaacaaatttatcatagacttctcttgttggtttacccatctgattcaatacttttggaactacatgttctggagcaacctttaactgaccactaatatgatgctcacataattctttaaaaaatgcatcattcttatcatgtattaaataatcatatcttagaccagaacgtataaataccttttttattccaggaagttttctaactttctttaagagagaaagatattcagtatgatctattatcaagtttttacatggactagggaacatacattgtttatttttgcaagtaccgtgatctatttgtttcttacaagctctatgtctaaaatttgcagtaggacctccaatatcatgaatatatcctttgaagtcaggtaaagtcgttaaaagctttgcttcgtcaattattgactcttgccctctattctgaattactctcccttgatgaaatgttagcgcacaaaatgaacatgagccaaaacagcctctatggcttgttatagaaaatttaacttcttgtattgcaggtatgccccccttttcttcatatatagggtgataggttcttgtgtaaggtaaatcatatgtcatatccatttcttcttgagttaagttttcttgaggtggattctgaactaaatatctatcaccgtattgttgaattatagttctaccgtttatagaatcttgttcgtagtattctaatttataagcttcaccataagcttccttatccgtagatacttcgtcaaatgaagggactataactgcatttttaatattagatatatctttagtcaaataacaagtcccacgaacacttgttatatttttaatatttgctccatatcttaataactctgcaatttgaacaacggttttttcgcccatgccgtacatcaataaatcagctttagaatctacaaggatacttcttctaactttgttatcccagtagtcatagtgagcaaagcgtctaagacttgcctctattcctccgattgcaatagctgcatctttataagcttcacgtattctattgcagtaaacaattattgatctatctggtctgtggccagcctctcctccaggagaatataagtcttcacgtcttgttttctttgcggctgtatagtgattaaccatagaatctatattccctgaattaactaggaaaccatatttaggcttacctaattttttgaaatcctcagaactattccaattaggttgagctataataccaacattaaaaccttgtgcttcaagagttctgcctataatagcagtaccaaaagaagggtgatctacataagcatcgccagaaacaataataaaatctaattggtcaatttttctttttttcaagtcttctttactaataggtaagaattctttacaaagcttcatataatattaactccaattcttaatttattttacttaaagcatatttatattaaaattacgtatattaaagatcgctatattgggatattatactaacgtaataaataattgaaaagtcaaatgaataagcttttaaagcttattcttaaagtatattaacataacaataattagtttacaaacaatatcaataggcaagtgtagtgtaaattcaatgcaactcataaagaaatatttataatttacaaattgaggattaattaaagaaatttttatgtgttcaaaagataaatcaaaacaaaaaattattgcctttttacttctatgtaatataataattagagatagtagtaaaatataactaagtgaagatatacagggcggtgtaaaagatggaggaaggacctcagaatataaactataatatagcaaaaactaaatatattcagaaggaaaatcttttatcttgccttaaaagatataagtagatgcaatttagttacaatactaattttacttaaggattttctttctgcagaagtaggggggaaataattaagatggaattatctatatttctatatactaacattctagataaaaaagtttatgacgagtttggtgatgttttaggaactctaagagacatttatgtgactacggaggatggatatcctagaataattggatataagcttaaaaaggacggagtagcctttcattatgagtttagatatatagaatttttaaatagggatggtaaaattaagatcacaacaagaggaagtaaagaaatattaccgatgaggtatagttatcttctttcagaaaatctattagataaaaagatagttgatataaatggaaaacaagttgtaagggttaatgatttgagaatcgcaaaaattgcaggagaatacagagttattggagttgaaacaggaaaattagcgagatacagaagactaaagatagctggtattatgaaatttatatacgggatcatgagaaagaagttagaagataaagttttaagatgggatgatgttgaatccttggaaatggttgaaaataatttgaaattatctataccatataaaaaattgtcaactctacatccagcggaccttgcagatatattagaaaatctagatacaaactcaagaaaacaagtattggaatcactggatgaggatttagcggccgatacattagaggaaatagattcagaatacaaggggacaataattaaggagctatctgacagcaaaactgtagaagtgctagaaaatatgcctaatgatgagatagctgatttgttagatgatttagatgaagaggaaagagaaaaaatattagtgaatttagaaaaagaagatgcagatgaagttaaggaattgttgcaatatgaggatgaaactgttggtagtataatgagtaaagaatttatatccgttaatctagatattacagttggagatactattgagatattgaaagaaacaaaaccagatgaagaagttatttattatatttatataacggatgaagaagaacgtgttcaaggtgtggtatctttaagagatttaatagttagtgatagtgatttgaagataagagaaataatggactattctgtatcacgtgtaaggcatgatgatgaaattagcgaagctatagaagttgcctcaaaatatgatttgaattcagtgccagtagtagatgaatacgaaaaattaattggaatagtaattattcatgatttaatagatgaatttttgtatccgctctggaagaagaaaaattagaacataaattatttaaatttttaataaaaagaatattttagttttagtatttacccatcaggaatacttgtttttatatatttaagaaagtcaacactttttaattaaaactttaaaaagtattgactttttttttagaaagaatataattataatataaaacctatcaaaacactaagaattaaaaactatgaaaaagaaaagtagcataaaggaagtttacagagagaaaaggatgctgagaactttttatctagaatttatgtgaagtgctctttggagttgaaatttgaaattaaatatattaaaaaatggagcgatagtatagccattgattttttgatatattttttagtatgattttccgggatcacccgttatagtgatatgatatcttaagtatcaaaattgagagggattagttatttaatccaattagagtggaaccgcgaaatttacttcgtctctataattttttatggaggatgaagtttttttattatatttaatataaaaagaatgtaaaaagatatactaaaattagtagaagtttgaggaggagaataataatatggtttataatggaggattagagttaataggaaatacacctattttaaaaattaataatttaattaaggacgaaaatagtgcagatatatacgtaaaacttgaaaaatttaatccgggtggaagtgttaaagacagagcagcgttaggaatgatcgaaagagctgagaaagaaggagtattaaagccaggggcaacaatagtagaacctacaagcggaaatacaggaatagcactcgcacttataggaaaattgaaaggttatagtgtaacaatagtaatgccagaaacaatgagtaaggaaagaagagatctcataaaagcatacggtgcaaatctgatattgactgaaggatctaaggggatgaaaggagccatagaaaaggctctagaaataggaagtggagaaggattttttatccctcaacaatttgagaatatagctaatccagaaaagcactatgaaacaacagcagaagaaatatataaagacattccagatttagatgcctttgttgcaggagttggaagtggtggaactgtgataggagtatctaaaaatttaaaaaagaagaattcggatattaaagcatttgcagttgaaccagcaaattcaccagttttaagtggtggaaatccaggtggtcataaaattcaaggtataggggcaggatttgttccaggagtttatgataaggaatatgtagatgaaatactacaagtaagagatgaagatgcatttaaaacagcaaaagcatttgctgaaaatgaaggtgtattgattggaatatcttcaggtgcagctgtatatgcagcaatacaggttgcaaaaagacttggaaaaggtaaaaaggtattggctattgctccagatgggggagaaaagtatatatctatgggattatatgattaattaatttaactataaaagttctattaataatcagaaattaacagtgaaacgattgatttaacttaagataccaatgaagttctattaataattgtatatgtgaaaagctctactgaaaactatagaaaggagaataggctgtgtttaaaaaattgaattacgatctagaaagagttttaaatgaagatccagcagctaaaagtaagctagaagtattattattgtacccatgtattcatgcattaatatcatatagaattgcacatgccctatatttaaagaaatggtttttcttggcgagattaatttcccaattatctaggtttttaacaggtatagaaattcatccgggagctaagataggaaaagggttgtttatagaccacggaatgggagtagttataggtgagactgcagaagtcggagacaatgtgacgctttatcatggtgtaactctaggtggtacaggtaaggatgtagggaaaaggcatccaactatcgaggatgacgttttaataggtacaggtgcaaaggtacttggacctataactgtggggaagggtgccaagataggagctaatgctgtagttgtaaagaatgtgccagcaatggcaactgcaataggagttcaggctaaaaacattgttagaaatagtgcaagtgcagcaataattgaaattagtgatttaaaaggacgcaaaaagaaaatatttaacgatatggttatttaatgctttagaatatggaagtatatgaagtacaattaatataaacttgtatattgtatagttcagtagcatttatttataggaattttactaagttaagatgttttactaaatattaaaatacaacatttctttattaattattttattaagaaatgtattataatctaaaagttaagagatgcattaattaaactttagagcaagaaagtttagttaatgtatttttttatatggagattctgataaagttaaataagttatattaatttatcttggtcataattaaaatgctttttgcaaataagttataataataaaagaagatattagtataattggtgttaaatcttacaataaccttaatatttttggtaattgcatagacatatgaaagcatatataatgtatataaataatgatcaataatatattatgcatgtaatacttgtatagaattgaataattgtaataaaatgtaattagtagtataatataaaatgtgattattaagaaaggttggagaaaaatgttatcaccagttgcaataaaattaataagaatgatgccagaagggataattataaaaatagcaaaaaaaatagtagataattatataagaaaatatgctaatataactgttaatggagcagataatatagataaagtaaaaaaaccaagaatatttgtatgtaatcacttgagtaattcggatggattagttttatcaaaaatgctaaaagagaaaagtgatccacattttgtaatgggaataaaattgtcagaagatccaataacgaaattaggaactcagatagtgaagaacataccaataaagcccaattccgctgataaggaagctattacacgagttgttaaagctcttaaagagggaaatgatattttaatatttcctgaaggtactaggagtaggacaggtgctatgatagaaggtaaaaagggaattctgttatttgcaaggatggcgaaagcagaaataattccaattggtatgtctggaacagataagttattacctataagtaaaagtggcgatatgggagcagagaaatggcagcatgctgatgttactataaacataggtgaaaaaattgtatttcctgctaaagaaaaggatgaagacaaacatgaatatgataataaatgtatggatatcctaatgaggagtatagctagtcttttacctgaaagttatagaggaatttataagtaaggagattacaaaagatatgaaagcaaggacaaaaaaaattgtagatatattaaaagagacatatccagatgcaaaatgtgaattgaattatggaacaccactacaattgcttatagctacaatattgtctgctcaaacaacagataaaaaagtaaacgaggtaacgaaagatttatttaaggattatccagatttagattctcttttaacattaacaaacgaggaacttgaaaaaaggataaaacagataggtctatatagaaataaatctaaaaatttaatacttatgttcaatcaacttaaggaaaaatttaacggagaagttccaaagacaatggaggaaataacttcacttgctggagcaggaagaaaaacagctaatgtagttttatcaaatgcctttaatgtaccatctattgctgtagatacacatgtttttagagtatcaaatagattaaaacttgcagattcggaaaatgttttagaggttgaaaaacaattacaaaaagaactaccaaagaaagagtggactcttatgcatcatctacttatatttcatggaagaagatgttgtagtgctagaaatcctaagtgtggggaatgtccaataaaggatttatgtagttatgataataaaactaacagataaaagaatatttataaaattttcatgaaccacaattaagacaatttatagtcaaagtggttcttttaattgtgccgttaatttaataaaataaagataagttagaatgaataaatttaattaacaggaaatattaataagtattttggaggtaatctatgaaaattggagttataatgggtggtatatcatcagaaagagagatatcattgcaaagtggaaaatctataattgaaaatataaacaaggaaaagtatgaagtgctaccaattgtaatagataaaaaagaagatataataaataaatctaaagggatagatttcgcacttttagctttacatggccaatttggagaggatggaacagttcaatccgtgcttcaaacactaggtataccatattcagggtgtgggcctttaagtagtgctatgtgcatggataaagatgtatcaaaatccgttttagaggcaaatgggattagaactgctccttggattaacttaagaaaaggtgataatatagatttcaataaaataaatgaattaggatatccagttgtagtaaaacctactcatggtggatcaagtgttgcaacattcatagttaaagaagagaaggaaattgaaaactgtgtttcagaagcttttaaatgggatagcgaagttatgatagaaaaatttataaaaggtgatgaaataacttgtcctgtatataataataaaatgcttccagtaattgcaattaagcctaaggctgaattctttgactttacatctaaatatcaagatggaggagcagaagaaatagtggttgagctagaagcagagttacacaaggaagtagaaaagatggcgttagaaacttataaggcacttaaatgcgaagtgtattctagagttgatatgatagttacagaggaaggtgtaccatacattttagaaataaatactcttccaggaatgactaaaaatagcctaattcctaaaagtgcagcagctttgaatataggattttcagaactaatagatatgatcatacaggattcattgaaaataagcagatagtatatgaattataaaactttttgaatatttataacattaaaattgaaaaactacttgtttaagaataccttagacaagtagtttttatcataatttctgttgaaaacaatctgcaaatcttcatgtaaaaccttttagaaaatataacttatattaagacaacttagttattgtttttttttgcaatctttacatacgcccttcataaccaagtcatgatctgttaaagtgaagccagtcgcattttgaactaattcttgaatttgaagcataggacaagggatttcaacttctttgtgacatatatcacattccaaatgatgcctatgagtttttccttttagcttatatgaaaagactccatcatttagagttattttttcaataatttctttttcttcaaataattctaaagttctataaaccgtgctcaaatttatatttatattgttgcttttataaatctgatatattttttcagctgacaaactgttttcagaattttttaatatacttaggatttctgttcttcctttagttattttaattcctttatttttaagaatttcctttggttccattttcatatcccctaacagctaaatattaaatatattatatcacatatatttaatatcttaaaaaaatatcatcttaaaaccaaaaaatataagagctatcccgccaaaaaaattagcatacgttgtaacaaattttatctttttaatgtatctgcacataaaaaaacctactgtacatgtaaataaagtgattaatccaatcaaaattgaatcaacacaaagtagtagattgtatgaaatctcatgaaatgcagtgaatcctataactagtgcatctatactaactgatattccaagtattaaacaagtagtattctttattaaaatttcagtttctttttccttaaagccatctattattataagaattcctacgattgccataattattccaccagcaatggaagggatgcatgtaatataagtatcaaataaatatcctaaacttccacctacatatgtaaataaaaactgaaagaatgcaaatgataataaaaactttattttatggattctattaattctaggatttagaccgattcctaatgttacgccaaaagcatccatggccagtgcaattcctattattataatgtcgtacaaattcattttctcttcctcctttaaaattagacttactctataataattaaagtttttttaatatatgcaaaaattttaaaaaaagtctttattaaatcttttttttgttgtatattaataaatagtatattactattggctaaatagtatagcatatttaaccaaattagtatagcaaacaaggaggaaatttcatgtcaaattgtataatagctcaatctggggggccaacagcagtaattaattcaagtgtagtaggacttttaaatgctaataaagaactaaaaacttttgaaaaagtttatggaggcctaaatggtattgagggtatattaaatagaaatataattgatttgtcatcagtttcagaaaatgaaatagataattttagatttactccatcttcaggacttggatcttgtaggtataaattaaaagatttagattcttgtagtgaagaatatgaaagtttaatagaaatacttagagaatatgatataacgtcattcttttatgttggtgggaatgattctatggataccatagcaaagctttcacgatatgcaaaacaaaatgatattggaataagttttataggtatacctaaaactattgataatgatttaaaattcactgatcatactcctggctttggcagcgcagcaaaattcattggaacaacagcgcttgagacatatttagatgcatcagtttacataaacaacggtatatttattttagaaacaatgggaagggatacaggatggcttgcagcttctgcatgtattgcaaagcttgatggaaaaccaattgcagattttatatatcttcctgaagcagcttttgataaaattaaatttttaaatgatgttaggcaaagatttgaagaacaaaataaagtgtatataattgtatcagaaggaataagagataaagatggaagattcatttctgaatttgattgtgtttctcaagataaatttggacacgttcaattaggaggtgtatctgaatacttaagaaggataattcttgatgctggatttacaacaagagtaaaagcactgcaacttggggttcttcaacgttgtgcaatgcattgtgcttcagacactgatttaacagaagcgtataatgctggaaagatggctttacaatatgcttcacaaggagaatcagggaaaatggttagcattaacaggttatctaatgagccttatgaagtgaattacccattagttaatgcagaagatgtagcaaataatgttaagtatttccctatagaatggattaataaagaaggtaattttgtaacacctgaagcgtgctcatattttgagccattaatcaaagattctcctaatttagcttttgagagaaatcttccaaaatataaggtatttaatcaatagataataagtataaaatcataagcttagatgttttaatatttaactaatagaaggatgtatatatgaagaatttcatttatacatcctataaattaatagaattttcaatagtataataaattttattatactatttatttttagttctaaatcaagaaaatttgttattttatttttcgtaaagagatatcttctaatacatttaaaaaggtatcaacttcttcaattgaattatataatgcaaaacttactcgtatcattcctaacatttttttatctggattatcaaggaattctttagcttcatcttcacttacgttcatgagccttctacaatatggatgggaacaaaaccagccatgccttacagaaattcctttctttttagccaagatatcagctacatcatgatgatacatatcctctatattaaaggtagcaattccaagcctatcactgatgttttcagtatctccatagtttataattttagggattttcttaagtccttctatagtgtgctctaaaagaagtctttcatgtttttctatatagtcgtatccaatggtattaataactcgtaatgaattaactaagctcattacacccaaaaaatttggtgttcctgcttcattcttctctggtggtgtaagaaacttaacctctctatccattactaattcaacggttccaccacctaaataatctggatctgcatccatgaaatcctcttttaatcctattatgactcctataccaaagggagaataaattttgtgcgacgaaaataccaagaaatcaatttgatcatcatctgtgtccccgctaatattaactcttgtgtgcggtacaagttgtgcaccatctacaatcaatttggcaccatatttatgaaccagttttgctataaaatgaatatgatttatataaccagttacattagaagctccagtaagagatacatattttattttaccattgcttttctttagtttctcttccaactcttcaagtttaagtctgccttgttgatctacttcgatataatcaacgttacctctttttcgccaaggcaaatcatttgaatgatgctccattctagaggttaatactatttcgtctggagttttagtaagagtttttgctagtttgtttataccttcagttgtattactaacgtatattacaacatatttatctttatcttttacattgaaaaaatccaataaaaaatttttagattctttatataaattggttgttatttcagctttttgacctgttcctcgtcctatagaagcataagtattgctcaattgttttatatattcaatacttgacttaataggcggagttgtagctgcattatcaaaatttattccatctatacagtttccatctgaatcacacactttttcatctaatccaacaaataagtctttaatgttttccttattttctatcttcatatgcatctcctccaatatatatattattcctataatatatttattgttcgcttaagagggctgtaaaattcatatctttttctttccattttgtactatatataattgttatgcatattaattaagagaagcaaatattatttatttataggaggtagtttaaaatgaaccctgataagaagtatatgtctcaagtcagctcgagtgataacgatattagatttgttccaccagcatttatgagtacaaatatctacgaaaaagcttcgtttggtattgatgataataatcgtaatttagatttatttccttccgaaacaggcatgcctgaattatgttattattccgataatcaaaatgagggaattagtagtggtctcaattttaataacatagctaataatgaaatacctactacttttgatgcactaagaggtcttgatttagatttaaatgaagaagatcttgaaagaaataattctgataatgatgtgaataaaatttatgctagaattgaaagaagacatccaggaatattcgcgactctttattcatatagaattcctcgtccgatagttagagtaattataaaaaggttgataaaacttacattagcatattgcgataaaaataataactattaataaccagtttaacatacaaaaatatcttgaagatttacaactactataatgtaaaatctttaagatatttctttacatagcttttaaaaataggtttcaatatatatgaattacacgcttatcatagctaaaatttttttaaaaagtattggttttatactttcgatatctgttggttctttcaatattatagtagtaaaacatatgctgccaactaattcaaaaatcataaataatgtcatttcagcttcttcttcgttcattcctgatttagttaggttttttacaaaaatatctagaactttctttacatcattatatgcttctggtttcattattgcctttctataaagtccccatgaaatattcttattaattagcttcaacagagaaacattatcttttaaataatttattatataatcaataaagaatagtgtacgttctttaaaatttttgcttccaaaagcatttgttttagctaatccttctcgtattatttcattacttttttgaagaattaatttatttaaaatatcgtatttatcactgaaatacagataaaaagttccttttgctacttttgcattcttagttatatcatcgatcgaagttttttctatgccatttttaagaaataaatcatatgccgctaaaaataactcttcctcttttaattgttttttattctgggtaagagatttgttgttattctttaaagtcatattttgcctccaaattacgtgtttaacttattataaagcaaattaaataataatccaaattttacgtagagataataaaaaattatcaattaactcttaatatagttaaattgatataacaccgataagatagtataatttagtagagaaaatttagttaaactattaatccattatatataggatttacgttttaatattaaattaaacatttatagtttaaattctggattttcgtatgaaatactggaggataaaaaatgattgtattaagttgtaaaaatatatgtaaaagttatggtataaatactattttgaaagatgtaacattttcaataaatgaaggagataaggttggtataattggatcaaatggagaaggaaaaacaaccttgtttaagatattatcaaaagaaattgcacaagatgatggagaagtttttatagataaaaataaatctttgggttatcttgctcaacatttagcattagattcatgtaaaacgatttatgatgaaatgctcattgtttttgaagatctccaaaggttagaacggaagattacagagttagaatctaagatgaatgaaccgtatgatgaaaataatgcttcatatcatgagaaaattataaaagactatggaactgcccaagatttgtatcaaaacagaggtggatatacatataagggggaaatatctagagttcttaagggattgggatttactgaaggtgactttgataaactaatttcaactttaagtggagggcagaaaactagagtcgcactttgtaagctattacttttaaatcctgatatattattgcttgatgagcctacaaatcatttggatttggaagcaattgaatggcttgaagaatatttaaaaacctataaaggaactgtaattgtaatttcccatgatagatttttcttggattctgtaacaacaggaacatttcaggttataaatggtcatgtgaattgttataattctccatatacaaaatctttagaacttatgaagaaagattatgaggctaaattaaaagcttataatttacaacagacggaaataaaaagacaagaagcaataatagaaaaatttaggtcattcaatagagagaaaagtataaaagcagctgaaagtagagaaaaggcacttgataaaatggaaattgtagatgctcctgataaagaaaaaaacgcatcgaagattaaatttgaggcttccgttaaaagtggatatgatgtgcttcatgtggaaaagttggctaaaagctatggagaaaagaaattattcgataatttatcttttgatttaaaaagaggagaaaagattgcgttaataggtgaaaatggccgggggaaaaccacactttttaatataataatggataaagttaaaagtgattcaggagttaaggttttaggagtaaatgttaatgtaggatactatgatcaggaacaatctaatcttgatcctaataagacaatattaaatgaagtatgggatgactttccagagttaactacaagtgaacttaggggatttcttggatcatttctttttagaggcgatgatgtatttaaagaaataaacaagttgagcggaggagaaagatgtagaataaatctcctaaaattaatgttatctaaatcaaacttacttctattagatgaacctacaaatcatttggatattccttcgagagaggctcttgaagaagcaattttaagctatgatggtacattaattgtaatttcccatgatagatattttttaaataaagtaattaatagaatattggaattagaagagcatggagtcaatgaatatcttgggaattatagctactatactgaaaaaaagaagaatccacagagatttgaaacatatgaggggctagcatctggaaagacaaaaactcaattaaatgaagaaaagaaaaagaaaaaggctctagagaaagaagctaaggctaagcaaaatgaaattaagaatatagaaactaatataacccaaaatgaagaagctcttgaaaagttacaggaggaactttgtaaagaagaagtttattctaatccatctgaaagtgagagagtaaataaggaaattaagaatcttcaagaaactattgaaaaattatatgaacaatgggaagagctttctagttagtttaatgtgagatagactaacaagttataaagagaaaactgggagaaagactattaacattataaataaaggcatgttttgtgtatggtgcaaatgtgaacttaattacagtttattaggtttcataaactatgacaatgcatgccttttatcaggaaattatatgtgtattatatgcacatatagaggatattttatattttaattattttgatagtcatacataaaaatatgcatgaacatattttataaaatattaagaactactagtaattttttttaagatatttaggttagaatgaaattataatagaattcagatataaaatttttagattggagatggaatgtttggaaaaaggaactattctaattgtggatgatgaaaaggaaataagagatttagttgatatatatcttaagagtgatggatttaatactataaatgcatgtgatggtttggaagctattaatttagttagagataatgatatagatttaattatattagatgttatgatgcctaacttaaatggaatagagacttgtttaaagattagagagattaaagaaatgcctataataatgttatctgcgaaaagtgaagatattgacaagatattaggacttaatatgggagcagatgattatttaacgaaaccattcaatccattagagttagttgcaagagtcaagtcacaacttagaagatttcatatgtttggtaagaacacaaatatgttagaagtagaagaagaaaatataatacaaatagaagatcttaaaataaagttagaaacacatgaagtattgttaggcgataatatagtgaaacttactccaacagaatttgatatattatcattgttagctcaaagccgaggtaaagtattttcaatagaaaatatttatgagagtgtttggaatcaggaattcatgacttctgataacactgttatggttcatataagaaaaataagagagaaaatagaagaaaatccaagaaatcctcgatttataaagactgtttggggggtaggatataaagttgagaaataaagatgttggaaggcatagaacttttagcaatgacattccaaattcaaaattactacagtatactgaaaaattaatacgaagtataaaaaagagaattgagaagaatataagatttgaacttatgatggttataggaatatgctttttagtagcatttatcttttatagtttttctaataatctttttaagagagagcatactgagccgcagataaaatatgattatgattctattgagaggtctgcaaatgatttggctaaacaaatagagtctcaagaaaatttgaaattagaagataacgataagattaatgatattttagaaaatgtatctgatggagaggaaagttatataacagatttagatggaaaggtgttatataaaactaaaaatgttgcagaggaaaatatagatatttatagtgcactaaaaagtgcaatgacaaatgtaaatagtgaagagattggtgaaccaagagaaaaaagttatataatgcctctaaagataggaactgatagggtgtatttaatctattcaaagattccagaagcaaggataacatacaatacaattagcacgtcaaattcatctttagcactaattcttacagttatagtttttatagttttatttgttgtaataactaataataagatgaaatatttagatgagattgcagtcggtcttaagataatagcaagtggtaacttgaattataggatagaagaaaagggaacagatgaaattaaaaatatagcttataatataaatcaaatggctaaagaaattggagagaaaattagtgctgagagagatgcagaaaaaacaaaagcagatttgataacaaatgtttctcatgatttaaggacgccactaacatctgtgatgggatacatagggcttgttattcaaaacaggtataaagatgaaaaagaaatggaggaatacttaaacatagcattcaataaagctgaaagattaaagctactaattgatgatttattcgagtatactaagctaaataacagcggaataacactaacaaagactaaagttaatctagcagaatttctatcacaattaatagaagaattgacaccgttacttgatgaaaataaattaacgatatataaaaaattcgaatctgaaaaaatctcagtttctatagatacattaaagatgcttagagtttttgagaatataataacaaatgcaataaaatattcgtataaaccaggagaaatattaataggattatacgagaaggatgataaagccattgtagttttcagaaataaaggagaccatttatcaaaagaaaaaagtgaaaaattatttgatagattttatagactagatgaatctagaaatactaatacaggaggatcaggtcttgggttagctatttctaagaatatagtagaattgcatgacggcaaaatatgggctgaatcagtaggaaataatataagtttttatgtacaactaaacctataattaattactaaattataggtactttttctgttgtaaattaatatttatattagagaagtatttttatgtggaggaaatatgcaaaacaaaaatcctaacagtcgttttggagtagacataaatgaatatacaacaagtgttcagtttaacgtattggcaacaaaagtagattttttgtacttgagagcgtcaggatctgcaacaggaaggtttagggttgatagaaagtttgtagattatgcgaagaatagtaggaattatggaatcccagttggagcatatcatttttctatgccatcttatgatctaacagatgcggatagacaatgtgatgactttataaatacactgcagcaggggttcggaaacaatgattatggggatttgtttcctgtaatagatgtagaggcacctttggataaatcaataagtacaagaacattaattgattggattgatagatttagaaaaagatttgaaagaaaaactagaagaaggcttatgatttacacaggaacaaattttatagagctttatgataatttttatattcctggacgtggctatccactaaaaaatatgccactatggattgcaatgtatacaagcatccctattaatcctgaattccctcctaatgttggaggctggaccagatggaggatatggcaatatagtgaaagccaaactgtacaaggaattgggaatcctgttgatgcaaattggggaccggataatgtagatttattaaggcagcctcgtgttgttactggattaaaggcagcgtaccagaataggaacataaatgtttcttggaatagaaatcctgatgtagatttattgggatataacatttttgtaaatagagaatgggttggaactgttgatgaaaatgctacaagttacttaataactagtaataaggtaaatactcagaagaatgcaccagtagaagtatcaattgaagcttttgattatgatggagaaacttcaaaaactcgtgcaaaagtaaatctataataaatagtatcgtatttcagcttatatgggaatataatcatatttctattgatagttggaatatgatataatgaaaacattgatgacaatttgaaaaatatgtaaattgtcatcgataaatgtactcaaaataaatattaaacatataagatgtatgatatttaattccttgaaaggagaataagggagtggaaaaacgcaccggcaaaagagcaaacgcttctaaaaacaattataataaaaagaagaaaattatgctcgcaatatttacattaattatagtaggagctgctgcactaattgcatactcaatagctataaaaggtatagttaaggagtgggatgataaaatatatccgggagtaactgtacaagaagtaaatattggaggaatgactaaagaagaagccaagaataagcttacccaaacatttgtaacatctatagaaaataaaaagttatctattaaaatagaggacaaacaatatgaacttatttactctgatattaatcctaaatatgatatagatgcaactgttgaagaggcttataaacttggaaaaaaagatggggtcttaagcagatatataagcataaagagtaataatagtaagagcaaggaggttccaatcaaattttcttataatgaagaaaaattgaaggaatacgaggaaaaacttcagatagctgttaatcaacctgctaaagatgcagcagttagcatacaaaagaataatattgtgattaaaccagaaacagaaggaaagacagttaatttagatacactagatcagaagttaaaagaaaatataaatggagatattaattctgataattcagtatcaattgatttagaagtaacaaaacctaaaataactcaagaagatctatccaagataaaaggagtaatgggtactttttcatcaaattattccacatcgccggaaggaagatgtaataacatagaaatagctacttcagcaataaacggaacaatagttatgccaggagaaatatttagttttaatgacgttgttggacctagaacagctgaaagaggttataaggaagctggaacatatgttggaaataaaatagagcccggaattggtggtggaatatgtcaagtatcgaccactatttatagagctgctatgaaagcaaacctaaggtctattgaaagaacaaatcattccatggctgttggttatgcacaacctgggcttgatgccactgtttcatatggatatttagattataagtttaaaaacacatatgattttcctatatatattcaagggaatacgtcaggtaaagtagtgacttacagtatatatggagatcctagtgctttaaatggaagaacatatgatatggcaagtgaaattcttgaaacaataccaccagaaacaaaagtggtagatgatagcagtttaccagtaggacaagaagtaacagagggagctggaatgactggttatagagcaagagcatatcagataacttatgaaaatggttctgaagtgaatagagaagtagtatcaacagatacttatgcaagtgtaggaatagtagtcaaaaaaggaactcaacctgtagatgcgactcaacagccagaaacaacagcagagccgccagcagctcagccaacaggagaaccacctgtagctcaaccaacacaataggtcaaaatttaatatttataaaaaactcaaagcatattttctttaggaattattaagattaattagagaaaatatgcttaagttttattaaggttaaaacaactttaatatatttaataatttactgattagaatacacaataatataccttttatagtgaaagacttttccatggttaagcaattattatttttgacttgttatgaaccatatagtataattttaaattaaagtgaaataatttttgtacaaaataggagaaggtgacgttttgaatttaaatatagtattatatgaacctgagatacctcagaatactggaaatattgcaagaacttgcgttttaacaggcagcaagttgcatttaataaaacctcttgggttcgaaataaatgaaaagcaagtgagaagagcaggtttagattattggaaagatttagatctagaaatacatgatagctatgaagaatttttgaaaaaatatggtgagaaaacaatatatttatccactacacatggagaaacgcattttgatgaaatttccttcaaagaaggggattttataatgtttggaagagaatctagtggagttcctgaagaagtgcataataggcatattggatttagggttccaatgataaaatcaagtactagaagtttaaatttatctaatacagtagccatagtggcttatgaagctttaaggcagataggatttcctaatatgaaataattgaagaggaatgaagatatatggaaaagataaaaattataacagatagcactgctgatctgccaaaagatatatatgagaaatacgatatagaagttttgccattattgataaactttggtgaagaaagttatctagatggcgttgagataaatacggatgaagtttttgaaagaattagaaatgaaaatatacttccaactacagctcaagttactccgaatagatttgttgaaatatataagaagtacttagcggaaggatataaaattatatcaattcatatgtcttctgtgatgagtggaacataccaatcggcatgtattgctaaggaaatgctagaaagccaagatataatagttgttgattctcagaatgtaacagccgctttaggaatacttgtattaaaagctgttaagctcagagaaaatggttataatatttcagaagtagaagaaaaattaaatagcattagaaataaagttaagctttcagtttactttgattctttagaatacctcgtgagaggcggaagaatttcaaaaactgctggcatggttggtggaatgcttggaataaaattaatacttgaaataaaagatggtataatgtcagttaaagataaaattagaggaaataaaaaggcgattaagaaaattattagtgatttagaaaacgcgacgttagattatgaagtacctgtaatattgattgacgtaaataatattgaagtaaaggaagcacttagaacatatatgaaggacaatggtgttaactttattgaatgtccagttggatcaactgtatgtatacattctggacctggctgctgtggattagtttttttaaataaataaatttaattaataaataaaaaacatgcttttagctacaatttatatttaaacatagttgatataagtagtatataagcatgtttttatatttattttaccagacctaattttcatagttacatatagtggacttgcaatatttacagaataggaggtatactaatagaaagagagattacttcaataaatttaatgaatacgtttaattaaaaataatttatataaattataaggaggaaacttatgaatttggattataacatgaagatgacccaggaacagagattagtactcactcaaaatatgcaacaatccataaagcttttacaaatgtctcttcatgatttgagagaatatattgacaatgaatattcggaaaatccagtgttagaggttaatgaggaaataagctcatatgatgatgaacagataaacagagacgttaatatagaagacaaatacgatcataaaaaattagttgaagaattatattctgataattacaaggatagatcagaaataaattattctaatgaagaagtttcgccattaaatttcattgagaaaaaagtatcactaaaagaatatttacaagagcagttgattgaagccgacatagatcaatatatgttagatatatgtaattatattgttgaatcattggattatagaggctatttggaaatatcaacaggagaacttgcagaagaattgaatatacctgaagagatagttaataaggcattagaagtggtacaggcgttggaaccatatggaataggtgctaggaatatcaaggaatgtctgcttatccagagcttaaaattaaatattttagatgatgtaatagaaaagataattttaaatcatttagaaaatattgcggaaaataaatatgaaactgtggcaaaggaccttaatataaatccaagagaagctcaaagatatggtgatttaataaagaagctggaacctaaaccatcaagaggattttatacaggagaagaggttaattatataattcctgatgctgaaataaagaatgttgatggtgaatttttcattttgatgaatgaaagtgttttgccaagacttatgataaataaaacatatagagatgttttaagaaataatcaagattcagaaacaaacacttacgttaaggaaaaaattaatcaagcacttttcttaattaagtcaatagagcaaaggaaaaatacactatataaggtgttagaatgtgttgttgaaaagcaaaatgatttctttaagtttggaagacagtatataaaacctttgacattaaaagaagttgcagaaataatcaatcttcatgaatctactgtaagtagagcaattaaagataaatatgttttaacaagttatggaacagttaaaataaaagatttattcgcaagtgggttatcctcaaataataatgaagatatggcaacttcaaaaataaaaaatgaaataaagaaaataatagaagaagagaataaaagtaagcctttgtcagatcaactaataagttctatgttagtagaaaaaaatatgaatatatctagaagaactgtcgcaaaatatagagaggaattaggtattaaatcatcttctgcaaggaagagattataaaaattccataaaataattactttaaaattttaatgttaaaaattcaattgtcaatattcaattacgttttaagaatatgttaactttgagtatagtaatatataaagttcatgattactttttctgtaattaatattgacagttgataaaatggttcttgaattcaaaaatactatttcacatagctattattaagcgtaataatattaaatatggaacgctgtataaaactagaaaaaagtttgctaataatttattttgttagggtttttttgttttttttgaaatattataaaaaaagttttcctaaagactttaaaatttcaaaaaggtgttttataataatagatgtgggacgtaatgaaatgatatgggacacgtagtgaccaaaggagtgtttgagttgcaggaaatattagaattacaaaagaagatagttcctgagcttgtaaatacattggagaaaaggtataacgtactcagaacaatctttcataatcaacctataggacgaagagtactcgctgatatgttaaatgttggtgaaagaacagttagaacagaaataggttttttaaaagaacaaggtttaattgagataaatacttctggaatgacagttacaagtgaaggcgtagagattatacacaaactaaatgatttcattcatgaaataaaaggtctttcagaagttgaaaagaaaatacaatcttctcttaacttaaaaaaagtaatcatagtcccaggagatgtagaagaaaatcctttagttttaaaggatttaggaaaagcgtgtgctaattatgttaaagatgtgctaaaagataattctattatagcattaacaggcgggagcactttaaaagaagttgtagaagcttttccaagagtaacaaatttatctcagatacaagtagtaccagctagaggtggaatggggaaaaaggttgaaacccaggccaatacgttagcagccactttggcaaaaaaattaaatggtacttataagatgcttcacatctcagaaaatttgagtctagatataataggcaccttgcttaaagaagaggcagtaaaagttgttatagatactatacataaggcagatgtactaatttatggtataggtaacgcggtgcaaatggctcgaaaaagaggtgtaccacagcaagaaattgataatttgattaataatggagctgttggagaagcatttggatgttattttaataaagattcgaaaataatctcagaaactaccgcaattggaattaaaattaatgaagcaagaaaaataaaaacacatattgcagtagcaggtgggaaaaataaagtagagtcaattattgcaactgaatataacgacaatgatggtgttttagttacagatgaggcagcagccaaaggaatattaagtaaactaaatagttaaattcagttattaaattagtttgtaaaatttatttttataaaaaagaaaagcattattaggaggtaattgtaatggtaaacgtagcaattaatggttttggaagaataggaagattagctttaagattaatgattaacaaccctgaatttaatgtggttgcaatcaacgacttaacagatgctaaaatgttagctcatttatttaaatatgattcagctcaaggaagattcgatggagaaatcgaagttaaagaaggagctttcgtagttaatggaaaagaaattaaggttactgctgatgctaagcctgaaaacttaccatggggagaattaaacgtagatatcgttttagaatgtactggattctttgcatcaaagaaatcagcttcagctcatatcgcagctggtgctaagaaagttgttatttcagctcctgcaggaaatgatctaccaacagtagtttacaatgtaaaccacgacatcttaaaggcagaagatacagttatttcaggtgcttcatgtactactaactgtttagctccaatggctaaagtattaagtgatgattttggattaacaaaaggtttcatgactacaattcactcatacactaacgatcaaaatactttagatgctccacacagaaaaggtgatttaagaagagctagagctgctgcagcttctatcattcctaactcaactggtgctgctaaagcaatcggattagttattccagaattagctggaaaattagatggtggtgctcaaagagttccaacaatcactggttcattaactgaattagtttgtactttatctaagaaagttactgtagatgaagttaacgctgctatgaaagctgctgcaactgaatctttcggatacactgaagatgaaatagtttcttgcgatataatcggaagcagcttcggttcattattcgatggtactcaaactaaagttatggaagttaatggagaacaattagttaaagtagctgcttggtacgataacgaaatgtcatacactaaccaattaatcagaactttaggatacttcgctaacttaaagtaatttgaattatatcttagaacataaagagcgcaaatttatgttaaagtaaataagtctggttttgtagtataaggctataaagccagactattttaaaatgaaggaataatcaataaaataaatatcagaggtgaaaataaatgaatttcaataagaaaacaattgaagatattgaagtgagtggaaaaaaagtactagtaagatgtgactttaacgtaccacttaaagatggagttataactgatgaaaatagattggtaggagctcttccaactattaaatatttagtagaaaaaggtgcaaaggttattctttgttcacatttaggaaaagatgcttcaaaatcattagcaccagtagctacaagattaagcgaaatgctagggaaagaagttgtttttgctagggatgaagaagttgttggcgaaaacgctaaaaaagcagtttcagaaatgaaagatggagacatcgttttattagaaaacacaagatgcagaaaagaagaaactaagaacattccagaattctctaaagaattagcttcattagctgatgtatttgttaatgacgcatttggaacagctcatagagctcactgttcaactgttggtgtaactgattacttagatacagctgtatgtggatacttaatccaaaaagaattaaaattcttaggaaatgcagttgaaagtccagtaagaccattcgttgctatcttaggtggagctaaagtttctgataaaatcgctgttataaacaatcttttagataaagttaacacaattattatcggtggaggaatggcttatacattcttaaaagctcaaggatatgaaatcggaacttcattagttgaagaagatagacttgaatatgctaaagaaatggttgctaaggctgctgaaaaaggagttaaattcttattaccagtagatcacagagttgctgcagaatttaaagatgtagaagctacaattactgaagatcaaaatattccagtaggaaacatgggattggatattggaccaaagacagaaactttatatgctgatgcaattaaagatgctaagactgtaatttggaatggaccaatgggtgtatttgaattcgaaaactataataaaggaacaattgcagtagctaaggctatggctgatgcagatgctactactataattggtggtggagattcagctgctgctgttaatattttaggatttggggataagatgactcacatttcaacaggtggtggagcatcattagaattcttagaaggtaaagtattaccaggaatcgctgcattaaacgactaattttaaataattggttttgaataaataatattttcaaaagaagtttataagtttagttagattataaagtgaaactttataggtagtgattgccccctaatgaatttaagttgaacttatccacaagagtgtaaacatatctcttatatttaagtaatagatttttgaagatgctagatggttaagtaagatatttgaatagttagggaatatatattcaaaaaaagtaataagctatttttttaggaagcaaattcgacgggatttggtgggtccaaggccaaggagccattcttaaatatttagtttgtaatttttgtagatatataataagcttaaggaaatttgatcactttccttaagcttatatagattcataatataattaagacttataagtttcattaataaaaaaattatgaggtgagtggaatgagaaaagcaattatcgcaggaaactggaaaatgaataaaactattgatgaagcagttaaaatggtagaagaattaaagccattagttaaagatgctacatgtgatgtagttgtatgtcctacatttgtatgtttagatgctgttaaaaaggctgtagctggttcaaatataaaggttgctgcacaaaacatgcattttgaagaaagtggagctttcacaggagaagttgctccaggaatgcttgaagctatgggaatagattatgttgttttaggtcatagtgaaagaagagaatacttcaatgaaactgatgaagcattaaacaaaaaagttaagaaagctttcgaacataatattactccaatactttgttgtggagaatctttagaacaaagagaaaacggaactactaataaagttattgaagctcaaataaaagctgatatagctggattaactaatgaacaagtagaaaaacttgttattgcttacgaaccaatctgggcaattggaacaggaaaaactgctactgatgaacaagcaaatgaaacaatcaaggctataagagctatggttgctgaaatgtatggatcagaatcggctgaaaaaacaagaattcaatacggtggatcagttaaaccaaatacaataaaagcacaaatggaaatgtctgatatagacggagcattagttggtggagctagcttagttccagctgatttcgctgcaatagttaattattagtattaaattttttaagctgtcttagaatgacgaaaatcgcactaagacagctttttttaagtaaataataatttgatattaaagtaattcataaaacatttatattataataacataaatttactttaaatgtttataaagttgcattaagtgtaaaaaaataatataatttaagatattaatagtatgtaaaacataataaatgataatatttaatattatatatttctaacaaataaatttatttagttaacttacagatattaatttaataaagaaatctaagaattttatagtatattttgtgaaaatatttggagggataggaaatgtcaaaaaaacctgttatgttaatgatattagatggttttgggattgcaccaaaatcagaaggaaatgctgtaactttagcgaaaaagccaaatttagataaactattcgaaaaatacccaacttcacaattacaagctagtggcttagctgttggattaccagaaggtcaaatgggtaattcagaagttggtcacttaaatatcggatctggtagaatagtataccaagaattaacaagaattacaaaagcaatagcagatggagatttttttgagaacgaatcattaaaattagctatgactaatgctaaaaagacaggatcgtctttacatttaatgggcttattatcagatggtggagttcattcacatatagaacatttaagaggtcttttagaatttgctaagaaagaagaagttcaaaatgtttatgttcatgcatttatggatggaagagatgtgccaccttcatcaggacaagaattcattgaaaaaactgaaaagatgatggctgaagtaggggtaggtaagattgcaactgtaagtggtagatactatgcaatggatagagataatagatgggaaagagttgaacttgcatataatgctttagttttaggaaaaggtgaaactgcaagtagtgcaactcaagctatagaaaaatcatatcatgataataaaactgatgaatttgtattaccaacagttgtaactgaaaatggtaatccaactgcaaatattaaaaatggagattcagttatattctttaactttagaccagatagagcaagagaaataactagagctattaatgataaagaatttgcaggattcaagagagaaactttagatcttacttttgtaacaatgactcaatatgataagactctagaaagagtaaatgttgcatatactcctcaaactttaagtaatactcttggagaatatgtaagtaataagggcttaaatcaattaagaatagcagaaactgagaaatatgctcacgttactttcttctttaatggtggagtagagaaagaaaatccaggtgaagacagaaaagttataccttcaccaaaggttgcaacttatgatttgaaaccagaaatgagtgcatatgaagtaacagatgaattactaaatagattagatagtgataaatacgacatggtaattctaaactttgctaatccagatatggtaggtcacacaggagttgttgaggctgcagttaaagcaatcgaaacagttgatgaatgtgtaggaaagattgcagataaaattttggaaaagaatggatgtttatttatcactgcggatcatggtaatgctgaaactatgatagatttttcaacaggaaacccatatacagcgcatactacacatgaagtaccatttgtttgggttgcaaatgatactgaaggtaagaaattaagcaacggaaaacttgctgatattgctccaacaatgttagttcaattaggacttgaagttcctacagaaatgactggagaaaatctaatagtaaataagtaattttaattaataaaaaagctgcttgaaataatttttaaattgtttcaggcagttttttattttagaaaaaatataattttttgaaatttctttattaaaattttagttgtcattaaaaaaagccaatgttatatacactaaattataagcttaattaattaaaacttattatatatattgcaaaaataattctttatgataattctgaaaatattgcaagaattttatcagtaattgtggatttaaacatatatatgactaagtacaaatctacttaaataagggaagaaaaataagattttaaagaaggatttactcagaattgcataaaataagcataaaattaatatattagtaaaaaagatttaggattgataatatgaaaaagaattttgcatattctgctgattttgatgagtatacagaaaaattatttagagaggctaagtatctaggtgagggaaacaatggtgtggtttatgagttgccaaataaaaaagctatcaaaatatttctgaggaaaaaggtatgtaatgatgagggcagtattcttgctaaaactaatgggtcgaaatactttccctatatgtataagagaggaaaattctatgtgataagggatcttgtggatggaataaggcttgataagcatataaaggagaatgggttaagtgaaagattagttagaaacatatatgaattattattagaattcaagagacttaaatttaaaaaattagatatcagatgtaaagatgtttatgtctcagaggatgaaaaacttatgataatagatcctaaaaaggcgtacagtagaaaggttgattatccaagacacttaatgaagggattatgcaaagttggtgtattggatgaattttttgaatgtataaagaaaatagacgcaaagaaagctgcatcatgggaattaaaatttagaagatattgtggggcaaaaaatttatcgatattagatgatgattaaatatataaagatataggagaagataactcaaaatgaatatttaatgtaatgagttttaagtaaaacacttataaattttatggcattagtatcattttgagtaaatctctaatggaatttatataaaagattatatcggctaatatgttaagaagaattgtataaattaaacaaataaattatgttatgtaagtttgacttttgatctaattaaaccatataagtcagttttatatttacataaaaaataatatgaatattcctaaattattttaccaataatattatggtaaatgaaataaaaagctttttatttagtaaattatgtattataattatattgataagaattctcaatacaattataaaaatgaggaggtaatattaaatgaaagattatttagaaattgtagatgtagttgcaagacaaattttagactcaagatgtttcccaacagtagaggtagaaatatatttagaagatggaacaattggaagagcagcagttccatcaggagcttcaacaggaatgtatgaggcagtagaattaagagatggtgataaagataaatttttaggaaaaggtgttttaaatgcaattagaaatgtaaatgaaattattgcagaagaattaattggatgcaatgtgtttgaacaaacttacattgataaaatgctaattgaattagatggaacaaacaataagagtaagcttggtgctaatgctatattaggagtttcattagctgttgcaaatgcagctgcaaattcattagatatgcctttatatagatatatcggtggagttaattcaaaagtattgccagttcctatgatgaacatattaaatggtggatcacatgctgataactctgtagatttgcaagaatttatgatcatgccagcaggagcacctacatttagtgaagcgttaagaatgtgtgctgaagtttatcacacattaaagaaaattttaaatgataaaggttattcaacaggtattggcgatgaaggtggatttgcaccaaacttaaaatcaaatcaagaagctcttgatgtaataattgaagcaataggaaaagctggatataaggctggagaagaaatctttatagcaattgatgctgcttcatcagaatattataaagatggtaaatacgtattagaacatgaaggaagaacattaacatcagcagagatggttgatttctttgaagattgggttaataaatatccaattatctcaattgaagatggtatggcagaagaagattgggaaggttggaagcttataactgaaagattaggaaagaaagttcaattagttggtgatgatttatttgttactaatacagaaagacttgaaaaaggtattgatcttggtgtagctaattcaattcttattaagctaaatcaaataggtacattaacagagacattaaatgctatagaaatggcaaatagagctggatatacagcagttgtttctcatagatcaggagaaacagaagatacaactatagctgacttagttgtagctgtaaatgcaggtcaaataaagactggagcaccagctagatcagaaagagttgctaagtataatcaattgttaagaattgaagaagagttaaatgatgttgctgagtacagaggcagaaaagctttctttaatataaaataaattattattaaagataatttttaaggcagaagtaattttgcttaaggataaatcacaataaagtttattaggaaaagttataggaatatagttcttataacttttttctaaattctaaataattcgatcttgatgtaatttttattacataagttgtaataagtaaataaatgtgatattattaaatgtatgttattgatcattataggaggtgttacctatgcaaaatatattattaatttttgaaggaatattaggcttagctactattataactgtttatatgcaacctagtaaagctgatgcgttaagtggtttaatacaaggaagcacaaaagatacattctttgcaaaaaataaatcgagaactaaagaagtaattcttgtgagattaacagttgtttttatggcattgtttgcaattaatacagttttattaaatttaataaaataataactataagctactttacttaggtagctttttttttatgagaaatttactaaaaaaataaattaaagtatctaataaatactaataaaattgtaaatatatattgacaaattattcaatgtgatatatatttaatatactttactaaatatataggaattgtaagaaataaaagattatctgactggaaaaccagagggcattttcattaatttgaatatgtcctctttttgcattacaaagatatttaatagctacatacttgaataaatgagaagaatataaagcataaaaattaattagatttagttatctgactggaaaaccggaggacatgtttctatagctatggaaatatgcccttttcttttaataatgcaccttatagataaaggaataatatttatgctatttagatttttatttaagtctatatttaaaattaagtactttaaggaggtgataatatgcctagatattccgtaaaaattatatgcatcaaagcatactaaaaaaagatcttaggatttcatataagttatggaaatcacttatatgaaacctaaggtctgagtttgcaataaatatttaaagaaattaattaaaatttttatagatagggggagaaagagtaatggggaaattcaaaagattattatctctgacattagtttgtgctatcagtgcttttgttactggatgtcaaaagaatgtagatcaagcagtcaattcagaatataaatatggaaaattaaaaatacaagcacttagtggagctgtttgcggggcaccagcgtatgttgcatatgaaaagggattttttaaagaagaaggcttggatgtagaacttgttagtggaaccttagatgaaaataaaactgggcttgcaactggagagtttgttgtaactaatggtgactttcaatggtttccatctatacaacaaggaatgaacttaaaagtgattggagggctacacaaaggatgtataaaaatagtacttccaccaaattcaccaattaagactgctgctgatttaaaaggtaagaatataggggttgatgaaattggtggtacgccaatgtcagtagcaacaattgtattagctaatgctggaattaatcctcaaaccgaagtaacatggaaaccatatcctttagatcaattaaatgaagctgttagtaaaggagaagttgatgcatttgcagcatgggatccatttggaacattagctgtagaaaacaatggatatactgtattaactgatatttcaacagacccattgtttaaaggtaagagctgctgttttctatatgcaagcgaaaatcaaataaaagaaaatccggataaagttaaagctatagctagagcatatcaaaaggctgatgcatggataaaagaacatccagaagaaacagcacaacttgaaatagataaaaaatatatagcatctgatgatgttaagcttgtaacacagcttattaagtcttacgattttgaatacacaacagatactgcaaaagacgatattagttattttgttaaaaaattagataaaacaggatttttaaaggataatacagatccagcccaatttgccaatgatacttattatgatattttaaagagttaaaaagataggagttgtgcacatggatttacaagaagtaaatattgagaaggcaaaaaatgtatcaaatattattatattaaaaagaaataaagaagatattggattgaaattgttagatgctctttattggaagccaaaatctgtagtatggagaattattaatattgcaatttttgctttagcgcttcttgtaagttttgtaattccattaaagcaaaatgtaattttagaaccttacagattttttctaataattttaatagcgtattttatagtaacaaatataatcgcattatttaattctaagattaaagctaagattaatcataatgcgcaactgtattcgggaataggtatattgcttataatgtgggacttactaacaacaaaatctaatactttaccacttccattctttccaagctttgctcaaatacttcaagttatggtcgaagattatggaactttaataataagtaccggacattcaatgaggctgttagttataggatttacaataggaacaattttaggaataactactggagtattaataggctggtacaggcagtggcattattggatatttccaataataaaaattattggggtagttccagctacagcatggattcctatagtaatgtttatattcccttcaagtttttatgcccaaatatttttaatagtaatttgtgtatggtttcctgttgcatttatgacgtcttcaggaattgaaaatttaccaaagtcttatttcgaagctgcaaagacattaggagctaaggatgattttttgatttttaatgtagcaattcttggggcaatgccttcaatttttattggtatctatacggcaaccgggctttcatttgcaactttagtagtatcagaaatgattggagctaaggcaggccttggatggtatattaattgggctaaagggtggtctaattatgctaaagtttatgcttctataataataatggcaattgttttttcaatagtaatggctattatattcaaaattagagataaggtattagtatggcaaaaggggttgttaaaatgatagaagaaaatagcaggaactatggttcaattactgtaaagaatgtcttcagaacttatattgatgcaaatggtaatgaagttgaagcgttgaaaaatataaatcttaatattgaatctggagaatttatatcttttatagggccttcaggatgtggcaaaacaacacttatgagacttattgcaggtttagatgaagcacaagaaggcgaattatttttagatggtgaaaaaattaatggaactagttatgaaagaggatatgtttttcaacaggctaatctgtttccttggcaaaatattgaggataatgtctcagcaggccttagagcaagaaaaatatataaagagcacaaagaagaggtatcacattatatagaaattgcaggacttaaaggatttgaaaaatcttatcctcatcaaatatctggaggcatggcacaaagagcatctttagttagagcgcttataaacagtcctaaggttttattattagatgaacctttaggagcgctagactcctttacaagatttgcgcttcaggacaagctgctagaattatggaaagaaagagaaaacacaatgattttagttactcatgatgttgatgaagctgtatatttaagtaatcggattgtaataatgtctccaaggcctggaaaaattgaagaggtaattgatgttaatttaagaagaccaagaaatcgtaccagtgatgattttttgaagctacgtaagagaatacttgaaaaattaaatctggtaagtaaacctaaagatttagaatattatttatagttttatagaggtgatgcttttgattgaaaaaactactttaaaagtagaaggaatgacgtgtacactttgtacaataataatagaaaatgcaattaaaacattaaatggagtagtaaatattcaagccagttatgcaagcgagaaggttaatattgaatatgatagtaaaataatttctatttcaatgataaaagacaaacttaagaaaagtggatattatttatacgatctagaagaaaatcatgtgcctaataagagaaaaagtgaaatcgacacattaagaaaattagtaataatatcatttgttttaaccagtcctatgattttaatgatgatccttaatggagctagtgactgttgtatatcttttgacattttaaacaaatcaagcttaagtaaatttttagaaagcttaagatataaaactctattccttcatgattggagattacagtttatattggcaactccagttcagtttatagtaggttctagattttataaaaaagcttattttgctgtgaaagctaaaattttaaatatggatgtacttgtggtattaggaacaaccgtaacttatttttatagtttatatacatcattctttggagtaaccaactcatcagggataaaaaatgtattttatgaatcttctatggttgtaataacatttgttttacttggaaaatatttagaggaaataacgaaaggaaggacttcaaaggagataaaatctttacttaatctacaagctaaaacagctagagttgaaatgaatggagtagaaaaagatactccaatagaagaagttaagccagaagataaaattatagtaagaccgggagaaaaaatacccgtagatggcattatattagaaggaaattcatcagtaaatgaagcaatgattacaggagaaagtttcattgtagaaaaaagcatcggagatgaagtaataggagctaccttgaatatgtatggcacatttaagtttaaagcaactaaagttggaagtgaaacaaaatttggtgaaatactaaaactagtagaagaagctcaaaacagcagggctccaatccaaaatttagtggacaaagtatgcagcatttttgttcctgtggttgttttaatttcaatagttacattcattatttggtatttcattatcttaaatgggagttcttactttttatcaaaaataataatatactctgtagctgttttagttgtatcttgtccgtgtgcactaggacttgccacgccgactgctattatgactggaattggaaatctcgctaaagaaggaatattaataaaaaatagtgccagaatagaaaaattatgtaccttagatacagttgtatttgataaaacaggaacaattactacgggaaatctaactgtagatgagattatatttgtaaaagataagagtaatttagaaaaagaaaaaattctaaaacttgctgcaattgctgaaaaaaaatcagaacatttaataggtaaagctatatatgaagaaattgagaaagatttttcagcaaaaatagaagatccagatgattttaaagctattccagggagaggaataattgctatctataataacaatgaaataatcattggaacagaaaaatttataaaggagcaaggtatttgcttagataatgcgctaagtaatttaattgaaaataaaggttatgaaaatggaaagacagttattgttataggcataaataataactgtgaagcaattattttcttatctgatactataaagcaagatgctaaggaggctattgcgaagctaaaaaataatggtatagatgtaatactgttaagtggtgataataaaaaatccactaaagaaatcggtgataaagtagggattactagtgttatcgcagaagtactgccagaagaaaaaggaaaagtaattgataggttaaaagctgatggaagaactgttgcaatggtaggagatggaatcaatgatgcggttgcgttgtcaaaagcagatgtgaattttgctatgggaagtggaacggatgtggcaatagaaataggagatgtaattattttgaatagtaatctactgtctataccaagtgcgattaagaaggctaaaaagataagaagaaaaatccgagaaaatttaatttttgcatttatctataatataatagcaattccgtttgcagctacagggcatttaacaccagccattgctgcaattacaatgtcagctagttctttatccgtacttttaaattcattaagtttaaaaaggggactaagtagcaaaaagccattttttagagaaaggaggagcttttgatgaatgaatggggaaatgaaataataaatttttttcaaaacataatattgcttaaatatctgccggatcttaatacaaacacaagttatggtataatatttatcttcggattactaagttcttttcattgtatcattatgtgcggaggttttacaatttctcaagtattagggagtaaagtagaaaataagaaaaaatttaacggatatttattatataatgcttcaagaataatttcatatactattgttggtggacttgctggtggaattgggagtgttcttggatttactgaaatacttaaagggattgttccaataataggaggaatatttataattattaccgctataaatcaattgggatttttaaaatttttaagaaagttcaattggaatccttctttaaaaattataagaaaaattggagttggaagaaactatggaccaatattcttaggtctaattagtggaataatgccatgtgtaccgcttcaaacagtagaattatatgcactaggaagtaaaagtattatagttggaagtttttctatgtttctatttggtataggcacgcttccagttttgatgatatttggaactataaattctcggttaaacagaagatatactgttaaaatagctaaagtgggagcaatactagtctttatattaggattttcactaataaatagaggttttgcattatttggagctaatgcgatggatatgaaaatggaatcaaaagattcaagtaaggtttatacatcatacattaatggaggtagtcaaaatttaattacagaacttgagaaagattcatttccagagatacgtgttcaaaaagatgtgccagtaaaatggattatagaagtggaaaaagatagattaaatgagtgtaataacgagattgttatttcagaattaaatattgataagcatttgaaagaaggagagaatatcattgaatttacgcctaaagaaataagagaaataccatatacgtgtggaatgggaatgataaaaagcaaaataagtgtagtagataagatagattctaatgttaattaaatgatatgtaatcattgcattgaaataattttagagtcaaaatatttaaattaataaatataaattgttcattgacaaaattatctaaatgttatactataataaaaatacatttcttataaaaactatcggaatacttaaagatttttttcttagtggaagttaaccagaaaactggagactaaatttattttctaaacttatagaagataaattagtctccttttaattttactcaataataataagcatagctaagcaattgtcgaaagtagaaacatttatcaagaaacttagagaagatattaattacaaaaaataattaaataaaatggaggaaaaattatgagtaatcaagaaagaaaattaaaatttgaaacattacaaatacatgtaggacaagaaaaaccggattctgcaacagatgcaagagcagtcccaatttatcaaacaacttcatatgtgtttagaaattctgaacatgctgcagctagatttggattgtctgatgctggcaacatatatggacgtgtaacaaattctacacaagatgtttttgaaagccgagttgcagccttagaaggaggaattgctggtcttgcagtagcatcaggagcagcggcaattacttattctattgaaaatataactcgtgcaggagatcatatagtttctgcaaaaactatatatggaggatcttataatttattagcaaatacattacctacttatggtattacaacaacatttgtagacccagaggatttatcaaattttgaaaatgcaattcaagataatacaaaggcaatttttatagaatcacttggaaatccaaattcaaatattatagatgttgatggactttcagcaattgcacataaacacaaaattccactaattgttgataatacatttggaactccatatctatttagaccaatagagcatggcgcagatatagttgttcattcagcaacaaagtttataggtggacatggtacaactttaggaggagtaatcgtagactctggaaaatttgattggttaggttccggaaagtttccgcaattaacagaagcagatccgagttatcatggtattaaatttatagaagcggctgggccagcggcatatataactagagttcgtactattttattaagagatactggtgcaagtataagtccatttaatgcatttatattactgcaagggctagaaactctttcgcttagagttgaacgacatgttgaaaacacgttaaaagtaatagagtttttgaataagcatcctaaggttgaaaaagttaatcatccatcattaccggaaaatgcagataatgaattatataataaatattttccgaatggtgcaggttcaatattcacatttgaaattaaaggtgatgctaaagaagctcaagatttcattgataaactagagatcttttcattactagcaaatgtagcggatgttaaatccttagtaatacatccagctagtacaacacactcacaactaagtgtagaagaattacttgatcagggaatcaaaccaaatacaatacgtctttcaataggaacagagcatattgatgatataatttatgatttatcacaagcctttgaagattaaactaaaaggctatattaactaggttcaaatattttagattaagctgactagaaagctagaggcattaaataggattaatataattttatttaatgcctttcttgatatttgaatcacgtaattttaagtaaaataatagcattatagcaaatagtattaacgctacttatcttaatgattttaagaacaatataatgaatttggaggaaaatattatgacagtaaataatgtagaaagcaaagaatcaaaaattgtattaaataacttaagtcaagtatattatgtaaaggaaaattcaaaaaaagaaaaatttcaagcgttaaaagatttttcgttatcaattggtaaaggagaatttattgcaattgttggtccaagtgggtgcggaaaatcaacacttcttgatataatatcaggtttagtaaaagcagaatcaggaagtatttctattgacggaaaagttgttaatggaccagcgttagacaggggattcgtaatgcaagggtatgcattatttccatggagaacaataagaaaaaatgttgagtttggtcttgaattaaagaaagttcctaaaaaagaaagaaataaaataagtgatgaattcattgagcttataggacttaaaggctttgaaaacaggtatcctcatgaattatcaggaggtatgaaacaaagggttgctatagcgcgttcccttgcatatgatccagaggtgttgcttatggatgaaccatttgctgcagttgatgctcagactagagaaaatcttcaagatgagcttatgagaatttggggcaaaacgaataaaactataatttttgttactcatagtattgaagaagctgttctgcttgcagatagagttgtagtaatgactagaaatcctggaactataaaagaaatagttagtataaatctaccaagaccaagaacaaattctgatatgagagcttcagcggattataacaggataactaataagatatatgaatatcttcataataaaacagaagagaaaaaagagacgtatgatgatgaattgatcatttcaaaggaaataactcctgcaatagcattataaagttgttatttagtgtgcaaaatcataataggagctatttaactaaaattttcaccagtttttaatggattaaaagatgagacacataagatgtaagagattatagaaatagtcctagtgtgtatgtataattccaatgttgttaatttgtttttaaagcaagtgataatgaagcagcttaagtttagtttcacaaagcaattaaagaggtagattttaatgaagaataaattttttatattaactattgtgatattagcactgatgtttacaggatgctcaaaatcatatgaaaatgatgatgtagtaaaaataggatatatcggaaattttactgaattgcctttatttgcggcatatgaaaatggatattttgataaagaaggagtaaaggtagaattagtaaaaattaatgataatgaggttgaagaaaaaataaagaatggaaatattgatgcatttacatgcgattataaatttttaaaatggaataatcctaatattaatatgaaagttagtatggggattacaagcggtgcaattgaaattataacatcaaaagatagtaatcttcaaaaaattaccgatatagaaaataaaagaataggtattgcaaatcaaggagatggaactatggccgctgccattaatgtattaaataaaaataatataaatgataatagtatcaaatgggtttatttaaaggatgaaaatccaacaacagctattgaaaatggagaggttgatgctgccgtggtttgggatataaatagagaagataataatattaatgttgtatataaaactggacttatagatagtgaaaagtcatcaggcaataatcatggtaatcatggcaatagttatttttatattaactttgctggagtaagaagtgagattgctgacaagtatccagaaaagacagcaggcattttacgcgcgtggattgaaggcgcggctgatgttgaggaaggtaaggataaatctttaagtaatgctgtggaaaaaggatatataaaaaatgtaagtgaggatgaagaagctaaaacaaaatattttatgtggatgccatcagttaaaacaggtaaagaaaatttaaaggaatatatacatattcaaaaatcaatgggtattattaatagtgatttaaatgaagagaattttcttaagagtatctttgaagatgtgttaccattttgggattaactatagaaaaagactaaagattagaatatacaattttatgtgtctgactagaaaactggaggatatatattttattaaaaagatagaatatacatcctccagtttttttattaaattactgcttagtataattattgagggaaactgtttcaaaattaattacttattgctatggtttaaaacaataacaaattaagaaaggtgtagaagcatgaaaaaaataaatttaagtattgcagaggttgaaaagcgtgaaacaagattgggaaccattatagcttgggatggtaatgcagctgaacttgtagatcaatctgactataatggaagaggttgtggtagtaaaaatggcggctgcagactatgtgaaatagaaggtccttttgcacaaggctctggatgttctgaggaaatggtagagtgtcaagcaggtcaggttagagatgcagtattaatacaacattcaccaattggatgtggtgctggacaagttggtaataacagactattccgttttggacttgcaacaagaaatctcccaatagaaaatgtaaaaattatgagcactaatttacttgaaggtgatatggtttttggagcaacaaagaagttaaaacagacagttgaagatgcatataagaggtataaaccaaagactatttttatagtatcatcatgtgcgactggaataattggagaagatattgaaagtgtatcatctgaatatgaaaaaaaacttaaaattccaatagtgccattgatttgcgaaggttttaagtcaaagcactggactacaggatttgacgctacacagcatggtatcttaagacaaatagtaaacaagcatcctaaaaagcaggaagatttaattaatattattacactttggggatcagatgtatataccccaatgtttagagagcttgggcttagagttaattttgtaattgacttagcaagtgttgaggatttggaaaggctatcagaagcagcgggtaccgtaagcttctgttatacattatcctcttatctttcagcaggtttagaacagtattttggagttccagaaataaaagctccgcaaccatatggatttaagggaactgatgcatggcttagagaaataggaagagtaactcatagggaagaattagttgaaaaatatattgaaaaagaacataagagagttgaacctattatcaaggaattaaggaagaaactaaaaggagtaaaaggattcacttcaactggttctggatattctcatggtcttatcacagtacttagagaactaggaatatcagtagatggttctttagtattccatcatgatccagtatatgatagtggaaatgtagaagcagattccttaaaacacttagttgataattatggagatgttaaaaactttagtgttagcaacagacaacagtatcaattttatagcttgctaaaaagagttaatccagattttattttaataaaacatggaggattatcaccacttgcatcaaaattgggaatttcagctgcacctttaagtgatgaaagtttaacaataggttatcaaggaatgatatatctgggaaacaagatattagatattttagcaaaaaagaaattccataacattctgaaagaacatacagaaatgcagtatacagactggtggttagaacaatctgatccatatgtattagctaaaaatcctaaccttttagatcagaaatttaatgaattacttgaatcaagaagagcagcagctatttagaaggagttaagaagatagatgagtaaaaaagttaaagagatagtgagaacaaattctatagaacaagtgcgctatggatgtgcaataggagcacttgcatcagtatcagcaattccatatgctatgccaattacacattgtgggccaggatgtacatcaaaacaatccggtgtattaatgagtaatggcgctcaaggtggtggatatagtgccggtccggtaatcccatccgttaatgcaacagaaaaagaagttgtatttggtggagaaaaaaagttaagagagttaattaagggtactttacttatagttaaagcagacttatacgtagtgctaaatgggtgtataggcgaattagtaggagatgacataggcgcagttgtaaaagaatttcaggagttaggatttccaatagttcatgcagatacaggtggattcaaaggaaataatttaattggtcatgaaatagttattaaagctataattgatcaatttgtaggtgattatattggtgaaaaagaagataaacttattaatttatggtcagaagtaccttatcaaaatacattttggcgtggagatttagaagaaattaaaagaatattggaagggtcaggttttaaggttaatgttttctttggggtagagagtaatggtgtagaagaatggaaaagcattcctaaagcgcagtttaatcttgtactttcaccatgggttggccttgaaatagcagaatatcttgagaagaaatatgaacaaccatttttgcatattcctactgtgccaattggagcaaaggagacaacagattttcttagaaaagtagcaaagttttcaggtaagaacaagagaaaggttgaagacttcataaaaagggaagaaaaaagatattatcattatttagatagtttttcagaattctatgcagagtatggatggagtgtaacctcaatgtatgctgtaattagtgattcaacttatggtttagcacttaatagatttttggcagaccaattaggttttgttccagctatacaggttattacagataatccaccagaaaaatatcgaaaacaaataagtaatcaatttgaaaatctttcagaaggtgtatctactgaagttgaatatgctgaagatggatatacaatagatgaaatcattagaaatactgatttcaagggtagagcaccaataatttttggtacatcatgggatagagatttatcaaaagaattgaaaggatatattatggaaattgctcttcctgtgtcaaatgaaattgttattgatagatgttatgttggttatagaggggcattaacattcctagaaagactttatactatagtcacagcaacagatacaaagataataacatcataaaagtttttatgatgatatttcttataattttaaataatttggaaaggtgtgacaggaagaatgaaacaaagatatgtaaatattattgttgtagctattttctttttaatatgggaattagcagctagaactggaatattagatactcaatttataccggcattttcaactgtagcattaagaatgtttaagatggcattaagtggcgaactatttatccatattgctataagtattgagagaatggcaataggatttattttagctacagttgtagcagtaccagctggatttatcttaggaggatgggttcctaagttagcaagcttctttaatcctctgtttacaaatttttctcaggttaatccatttactttgattccattatttataattttatttggaattggagaagcaggtaaagtaagtattattttctgggttatattatggccaatgctttttacaacaatggcaggaataaatcaaatagatccaatctttattaaaggtgcaagatcaatgggagctactggaatacaaatatttttcaatgttattcttccgggaagcataagtagaatatttactggtataaagacagcattaacagtaggatttactatgcttattggtacagaaatggttggttccgaagcaggaataggatggattgtttctaattctcaaaaaaattatgatgtacctaaattatatgtaggaattttgactatagcaatagtgggagcattaatatcggtattagctgataatttaaaaagctcaataattgtttgggaagataatttaaaggaagaatagtgtataaataaggaaagaggtgagtaacgtgaaggaaaaaaacaaagtaatatctaaaatgggaaaattgatttttagcactttatcaacagcagcattctttgtaatttggtatttagcgacttcaactggaattttagatactggaattattcctgaaccattaaaagtatttaatcaattggctacaaatatatttaagggtgatttgcttagtcatacattactgacatttaaaagagctataataggtttttttgtggcattaatagtaggattattaataggttttttcttagcttctatttcaaagaagttaagaaattacgtaattccaatcttacaatttttcgaaaaactcaatccgtttgcacttttccctttgtttatgttgttttttggaataggagaatttagcaaagtaataataattttttgggttgcagtttggccaattatttttcacactatagctggcgtagaaggtgtagataagctactaataaagtcagcaagaacaattggagcatcacctaaaacggaatttttcaaagtaattttaccagcagcattaccagatattattactggtattaaatttagtgcgcaaatagcttttatattagttatttcagcagaaatgctgagttcatcagctggattaggatggtttataagtattgcgaaaacacaatataatcttcctaacttatatggaggaacattatttgttgctgcattagggataactataaataaaatattaaacatattagagagcaaattatttgtatggaaagaaaaaactttttaatatattcaaggagggtaaattataatggcaatagaaaaagaaaaaaaagtaaaaagagttattcaagcagtaatagcagttttggttataggaggtattattataggagcgcaacttggtaagacgaaatattcatctccatctgaatccttggaagctaatagtagcgcaaaaagtgatgatagtacttctactagtagtgatgatttatttccaataaaaacggcaacaagaaaagattgtacattagccccctttttggtagcagataaaaagggattttttaaagaggaaggattgaaattagtatttactggtgaactaagtagtgatgctgtcacacctgcaattttgtcaggagataatgatgtagcggatacacatccgaatgcattagcgcttaaggtatatgggggatcaaaaattaaagcagtagggcgttcaataattgaacctggtcctggagtagatcctaaattgagacatatgaggttctacgtgaataaagatgcagtagctgctggagttaaaacatggaatgacttaacaaattataaaggcaatgaaaaacttaagtcagctggttatactaatacttgtgaagatttcattcctaataaaatttcagatgctaaaggtgtttcaagagataaatttgaatggattacatttgaaacagatcttcaaaaaattgaagctttaaaacttggacaagttgatattataggtgttcatccgccatttttcgatgcagcgcaagaagcaggacttactcaaattgcagattcatcagaagcgggacttggtgaagcaactggagtttatttatactatttctcagatagttttatagaaaaacatccagataaagtagcagcatttgttaaagctatgactaaggcacaaaaatgggcgaatgcaaatgttgaagaaacagcaaaattaactagtgaatttataggaactgaagtaaaaggaaatcactattattctgaaactacgaaaattgatgaacagactataaatccatggattgaagacttagagaacacaggagctattcctaaaggagctattaaagtagatgatattataacacataaatttgaggcacaataatgaaaaaaaatacggatgttcttttaaagcttaaagataaactaatagaaatatcaggtttgataattttgattataatctgggaatttatagctagagcaaaaattataaatagtgatgtatttccaagttttacggtaactataggagaaataggttatctgtggggaaatgaggatctatatatgcatataatgtcaacattgtggagatttacatttggacttttatcagccgttttaataggtgtggctgtaggaagtatatttgcaaaatataatgatatttatttaatgtttgaacctttaattagaattttttcgaaagttaatcccttttctttaattcctgtatttattgcattttttggaacaggtgaaatggtaagacttgcagcaattatatgggttggcgtgtttccgatattactgggaacattaaatgggataaaacaaatcgacaaggatttaataaaaaacgttaaagctatgaatatttcgttatttgatataatattcaaagtatatattcaagcatctgcacatagcatttttgctgggatcagaataagcgttcaaatgacattttttattataatcgttggggaaatgttgggcgtcaattcaggacttggatatcttctgcacaacggagcacatcattattttgatgcacctaaagtatatgcgagctgtgtaattataataatattaggagttattataaatagatttttcagatatatacaaaatgggttgtttttatgggaaaaaccagagtcactttttaaaaatcataaaacctataaaaaaatagacaactttactttaattattttatccattattatagcgggaatattaattttaggagaagtgcaattaaagttggcagcgtataaagcagaacatcctattgaattctttaaagagtaaagtgtgattaacaagtgccttattatgatattaaaagggaggagttgaattaggtgaaactaaaaaatgtgaatataagaggttatattacaatagtaatttttatttttgcttgggaatttttttgcagacttaaaatattagatcccgtgcttattccatctttttcgaaagttataactggaataggtgaattgtttttaaagcaaaaactgttatatcatatagagctaagtttttatcggtcttttttaggatttttactttcaattataattgcagtaccattaggtattgcaattagtattttagtaaaacaaatgcaatcatcagtagaacttgttttagatgcgtgttcccagataaatccatttattgtttatcatctaattataattattttaggtgttggagaatttacgcagatcgtagttattacatggacatgcatttggccaatactttttagtaccataactggaatacttaatgtagacgattcttatattaaacatggaaaatcttttgcacttaataaatgggattttataagtaaaatattattaccaggtgctttaccgcaaattatgcatggtgttaaactaagtctgaattattcattatttatgctaatagccgcagagatgatgggagggagttctggccttggatttctaattaaatcatgtcaaaatatgtacagagttgattgggtaataggaatagttattgttatagctatgataggattgttaatggattcaatagttatgtatttagaaaataaaaacgtatatttgaaatatatactccatgaaaaagaataagaagatatagttttttatagcatattatactaattcccacatatctcattttattcgaatgacaaaagtataagtttaaagagtatttgctttataaagaatctgtctaactaagtgaaaataatacggtatattatatatagattaattaatgtaatagcttcactttcagcttaatttattttttgggttctaaaatcataggggattctttgataataaagcttaatatgttatagaaatttttttgtaaaaatgaaaaagtatattgactaattattactatatagaatataataggtaataataaatcatagtaattcaataggaataataagaaaaaagtatagtatatattataatatatactaattataattttaatgcgatgaagggaataagtatattgaggaaaattttcagagaggaattcttaaaatagctgaaaggaattctaaatggaactctatagaatgcatcctggagtactaagttgaatttttggtatgtttaaaaataataaggtcgttaaatttaattttgtagatcaattattttatatacttgaattagtaggcttagcagtagtgcctgatatagcacataaagatgttatgagtaagaccgattaaattttaagcataataatcagagtggaaccgcggaaattttctgcctctgttttataacaggggtcttttattttattctttagaaatttatacaacagttacttgagggaataatttattgaaaagtttacgagtgtcagagaataaaaagggaaatatacacgtataaaaaagtggggagcgcatttaagaactttttatctcctatataaaatgtttttatatgcagatttttctcacattcattcaaaaaaagcaaaggcgtaaaagaattatatatcaaattttgaggggaattatatataatttatataataaaaacaaatatataaggtatctatatgtatatattgggggtgattgtgtggctgttaatagtaaagaactcacagaaaataaaaagctagaagaaatactaaagatggttgagaaaataaggtatgggtctataactttgataatacaagatggagtaattatacaagtagataaaaatgaaaaaataagaataagataaaaatttacatgtgaaggagtatatgttaggaaaccaaagaatattggtctaataaaataatttataattttttataaaaatgttgacatatacgaatgagaagaatatattatataaaaacacagcaatcttatatgaataagagtatatggaaaagaataatatttaagtaagtctgactggaaagctagaggacatacttctaattaatagaagtatgtcctcttttattttttaagaaaaatattattttaaataatttaaggaggaaagtcgtaattatgggaacaattaatttaaaagaatcttcagtgactataagggagacaaggttaggttcaattactggctttaatggatcagccaaggaacttgtcacatgtgctcatgcgggaaaattgaaagatagtccaagaaaattttctcaatgtatgggatgtaacgcaggtcatgctttttgtcaattatcgatgataagagatgcagttgttgttaatcatgcacctataggatgcgcaggtgatttctttggatttaattttacttatagagtcgaacagatgaaaagagagcttccggctacaataggaagatattttagtacctgtattgaagaaaaagatactgttttcggtgcagctaagaaattagaggataccgtaagagaagcatataaaagaacaaaacctaatgcaatctttgttacaacttcttgtgcatctgggatcataggcgaggatgtagatgcgataactgaaaatttgtcaaaagagctaggtataccagttatatcatgttcttgtgaagggtttagatctaaaatatggacaacaggctttgatgctgcttatcactcaattttaagaaagttagtaaagccacctagaaagaaaacaaataaaatcaatgtagctaatttctggggaagtcatatttttgatgaatttttaaatagattgggttatgaggctcaatatattgtaccattttcaaccgtagcagaattagagtatatttcagaagccgcagcaacaattcatatatgcccatcccttagcacttatttaggggcagctttagaacaagaatatggagttaaagaaataaaggctccaccagcctatggtatagaaggaacagatatatggatgagagagattggcagagtattaggcaaagaggaagaaattgaagaaattataaaagaagagcatgaaagggtactacctaaacttgaagaatatagagaaaaactaaaaggcaaaatagcatatgttacagccggggctgctcatggtcatgcaataatagccatgctaagggaacttggactcatagttcaaggggcagcaatatttcatcatgatcctctatatgacaataaagataaaacttcggatgctttagctcaaacagtcaatatttatggtgatatcaagcactataatgtttgcaataaacaagcctatgaattggttaatatattaaacagagtaaaaccagatcttatgattgcaagacacggaggaatgactatgtggggggcaaagcttggaataccaactttattaattggggatgagcaatttggttttggataccagggagttttaaattatgcttcaagaatagttgaaactcttgataatagagaatttgtaagtaatttagccaagcatagtactatgccttatacaaaatggtggctagatcaagatccatttactttcttaggaggtaataatagtgtcgaaaattattgaacaacctagattttcctgtgctttaggagcacagcaaacagtaatagccataaaacgaggagttcctatactacattctggaccaggatgcagtaataaaatcagttctttaataggacaaggcgaaggctatgcaggaggaaatacaattccgtgtactaatgctacagaagctgatgtagtgtttggtggggaacgaaaacttaagaatgttattgatggagctttccaagtaatagatgctgatttgtatgtggtacttactggatgcacatcagatattgttggagatgatgtaggaagtgttacgtcaaaatatcaagaaggagataaacctattgtatatgtagagacaggtggatttaaaagtaataattacgtaagtcatagtgaagttgtcaatgcaataatagatcaatatgtagataaattcaaaaatagcaatggagtaaaaaagggactcgtaaatgtatttacaacagtaccttaccaagatccatattggaatggaaatttagaagaaataaaaagagttcttgaaggtattggtttagaagtaaatatactttttggaaatgaatctaatggcattgaagaatggaagacaatacctaatgcagagtttaatatagttgcaagttcatgggtaggattaaatattgcagaacatctaaaaaataaatataaaacaccatatgtacattttccatacttgccaataggagcaattgcgacatcaaaatttttaagacaaattggtgaatttgggcatttagataaaaataaagttgagaattttataaagaaagaagaagaaaaattttattttcatatagaaaaaactgcggactttatgcttgagtttagatatgggttgcctagaaaattctacagcattttagatgcatcgtattcattaggattttctaaattcctattaaatgaacttggaatacttccaggaaagcaatttattattgatgataccccagagcaatataaagaatctataataaaagaatttgaaagcatatctgagtacagatcagcagaagttgaatttaatgtagatgctggcgcagttcaattggaaatagaaaaggaaaaagaaaaagattttcaagaaggcagggctttaatacttggaagtggctgggatagagatttagcggcaaaattaaatgcagatttgcttatcactagtgtgccagtaacatatagacttgtattaaattgtggttatgctggatacaatggtgggcttagagcaattgaggacatatatgatagagtgctaaacacctatagataaatatgaaaatatgaaagaatttaaatatgtatatagttaaatagaaaaaaatttaactatttaaatatgtatctagataacaatttaaatataaagatatataaatatttatagataaatagcgggtttgagatggatttaagccaactaaatataaaagataaaagggattatatggatttatagaggctttaaatatgagcgtttttataagaattattaatgcaaattaacatgaataattgataaatttggagggagaaagatgagtaattacaagttcgatactattaaagttagaggaggatacaatccaaaggaacataatgatgctgtatcagtaccgatatatgcaacagcatcttttgaagtaggtgaagcagaaagatttgataggttagcgagtctttcagaagaaggttttatttatagcagacttggaaatccaacagttagtgttttggaaaatagaatagcttctttggatggtggcatagcagcggtaggcgttgcatcaggaatggcagctataacttatgcattacttgcagtagcagaagggggaggaagaattttaacaacacatcaattgtatggtggaaccgtagatgctttaaaaaaactttatcctaagttcggaatccaaattgacaggattgaagatgacaatgatattgaggaatttagaaaatctataaaagaagacacaaaagcaatttttatagaaactataagcaaccctaatgcagcattatatgatataggggcaatcgctaagatagcacatgaaaataatattccactaattgttgataatacattcgcaacaccatatctatttaatcctattaaatatggagcagatatagtaatatactcagcaacaaaagccctaagtggccatggaaacgtgattgcaggagtaatagttgatagtggtaaattcaattgggcaaatggaaggtatcctcaattttcagaaccgtactttactctaaaagatttagagggaaatgaaagaagttatatagatgtatttaaagaaagtgcatttgctggaaaaatcagattagattatctaacatattttggagcagttttaagtccttttgatgcttatttgatattaataggtttagaaacattatctgaaagggtccagaagcaaattaataatacaagaaaaataatagattatcttaaaaatgaagaatctgttgcctggataaattatcctgaaatcgagggaagcccatataaatttttagcagataaatattttgctaaaggagtaggatcaacctttacttttggttttaaaggaaatacagaacaaatttataaattaataaattcagtaaaactatttagttatcaggcaaatgttggagatgcaagatctttaatagttaatgtacctaaaacaacccatggagaattaacagaggaacaattaaaattagcaaaaattcctcaagaaactattaggctttcaattggtcttgaggattctgaagatttaattaatgatttaagacaagcatttaaggaagctttaagctaattatagggaaagattaaaaatactttaggtatattaaaatagagaaatgaccaattaaaaaaattcatatttttatatgccgataagttttaataatttataaaaaaggagaatatagcaatggcagaaaaaactttaagacaagtggcaatttacggtaaagggggaataggaaaatcaacaactactcaaaatttaacagcagggcttgcagagcttgggaaaaatgtaatggtagttggttgcgatcctaaagcagattcaacaagattattattggggggactagctcaaagaactgttttagatactttgagagaagaaggagaagatatagagcttgaagccattatgaagacaggctttaaaggtataaaatgcgttgaatctggaggcccagagcctggagttggatgcgcaggaagaggaattataacctctattggaatgcttgaaaggttaggagcctacactgaagatttagattatgtattttacgacgttcttggggatgttgtatgtggaggttttgcaatgcctataagagaaggtaaagcaaaagaaatatatatagttgcaagcggtgaaatgatggcattatatgctgcaaataacatctccaaaggaattcaaaagtatgcgctaaaaggtggagttagacttggaggaataatatgtaatagcagaaatgttgatagagagcttgacctgctaaaagcttttgcaaaggaacttggaacacaattaattcattttgtaccaagaaataatgttgttcagagagctgaaataagaaaaaagactgtcatagagtttaacccagaagataaacaggctgatgagtacagagaattagctagaaagatagaagaaaatgatttatttgtaattccaaaaccaatgactcaagacagactcgaagaaattttaatagaatatggattaatggatttagatgaggattatataatttagtttaaaatcttttagacatattataatgaataggaagacttaaaacatcactattcgaggtaatgggaggcaattttatgataactgttaagaatataagtaaaacatttaatactccaacaggaaaagttgaagtattgagagatataagcctagaaatagcgcgaggggatatatttggagtaattggttttagcggcgcaggtaaatcgacattaatacgttgcttaaatggccttgaaaaacccgattctggtaatataatcattggtgaaaatgagataactaagttaaatggaaaagaattaagaagtgctagaaaaaaaataggtatgatatttcaacaatttaatttatttgattcaaaaactgtttatgaaaatattgcttttccattagaaatttcaggatataagaaagaggaaataaagagaagagttgaagagatattagaattagttgaattgtcagaaaaaagggattcatatccacttcaactaagtggagggcaaaaacaaagggttggtattgcaagagctttggctaatgatccggatgtacttttaagtgatgaagcaacttctgctttagatccacaaaccaccttttcaattttagaacttttgaaaaatataaaccaaaggttaagcttaacaatagtgataataacacacgaactagatgtgttaaggtattgcactaataatatggtagttttagaagatggtcatatagtagaagagggaaatacagaaaacttatttttaaatcctaaaagtgatactttaaagaaatttataacaataacaaagggatttcaaaataatgggaaattttcaggaggtgaaggaatatgagcaatgatttagttaaattgcttttagttggaacagaggaaactttatatatggtattgctttcatccatagtagcctttttgataggtgtgccaattggagtattattggttgttacggataaaggcggaatttttcctttatataaagttaacaaaatcgctggtttcttaattaatgtaataagatccacgcctgaaataatattaataattatattattgccattatcaaaatttattgttgggaccacattaggtgcaaatgcagctatagtatctatttcaataggttcagctccatttattgcgagaataattgaaaacagcttaaaggaagttgaatttggaaaaatagaagctgcagaatcaatgggtgcaactcctattgatataataaaaaaagttctgcttccagaagctcttccttcaattgtaagaggaataactatagcaattataggaataataggctttacagctatagcaggtgcaattggtgctggcggacttggaagtttagctataagatttggctaccaaagatttcgtacagatgtacttatagggactgtagttattctagttattatagtacaagctatacagcttattggagatctcatcgcaaagtcaattaataagaagagatttaagtttgaataaatatggagggattaaattgaagaaaaaattattatcaataattacaagtggattacttttagtaggagtatttgctggatgctcagctaacaaagaagatgcaagcaaagctacaagtgcatcaacaacaactgaaaagagcgaagtgactttaaaagtaggtgcagcattaacaccgcatgctgagatattagagcatattaagccaaaactaaaggaacaaggtattaacttagaaatagtgacccttgatgatgaaggccagctaaatccggcattggatgaaaagcaaattgatgcaaattattttcaacatgttccttacttagagtctgtatcaaaagaaaaaggatacgactttgaagtggcaggaaaaatacacgttgagcccataggattatattctaataaacttaaatcaataaatgatttacaagatggggataagataggtatacctaataacccttcaaatgaatatagagctttagttcttcttgaaaaaaatggactaattaaactaaaaagtggattagaaaattattctgcgacaccaaatgatatagctgaaaatcctaaacatcttcaatttgtagaggcagatgtagcacaattacctagatctcttggagatttagcgggagcagtaataaatactaatataattttagatgctaaaattgatccaaatacagcaattcttagggaagatggagattctccttatgcaaatgtaattacggttagaaaaggagataaagatagaaaagaaatcaaggcacttatttcagtcctaactacagatgatgttaaaaactttattaaagaaaaatatggttctgcggtagttccagcattttaaagaggaggaagatatgtcatacaaaatagcatttgcaagcagtgatggaaaagttgtaaatcaacattttggaagaacaaagcaattcttaattgttgaagtggatgataaagaatataagtatgtagagacaagatttaatgagccatcgtgccaagaatttcagcacactgaggatgctttaagtaaatctattgaattaatatctgattgtaaagcagtctttgtagcgagaattggacaaggagccttagctgaggttgaggcgaaaggaataaaaggaattgaggcaccttattttatagaagatatactaaaaaaagtgctaaattcaaaagtaaatattttagatttatattaataatctaagttataagtatgattcaagtaagtaaatagtatttaaagaattcaattaaattaggacttagattataaaattaaactttggataatgaataaattttgatcaaagttagaataaaggaagtgaactatatggggaattttgaccaccttgtaaaaactcatccgtgcctaggtggggaggcgcattttaaatatgggaggatacacttaccagtgagtccctcatgtaacatacaatgtaagttttgtagaaggggatttaataaatcagaagtgcgtccaggtgtaagttcattactacttactccagaagaggctgtaaaaactgttaggaaggcattaatgttatgtccagaaattagtgttgtagggattgcaggtccaggagatacgcttgtaactgatcatgctcttgagacttttaaattagtaaaaaaagaatttcctcatcttattaactgcttaagtaccaatggattaagattggaagaaaaggctgaaaagattgttgaagctggggttgagacaataactgttactgttaatgccattgatccaaagattcaaaaggatatatgttcttttgtaattgatgaagatggtaaaagactagaaggggaagaaggtgcaaagaagttaataaatgcacaacttagaggtattaaaaagattagcgaattaggagttatagtaaaaataaatagtgtcttaataccaggaattaatgatagacatatcaaggagatagctaaagtaactaaggggttaggagcatcaatattaaatataattccactaataccacaaaacgaactttctcatcttgaagcgccatcatgcctaatgcttgataaatgtagaggagaagcaggtgaatatcttgatgtatttaggcactgcaaacattgcagagctgatgcctgtggagttccaggtaaaaatcaagatatacatggtcaattatatgataaagaagttgttgaaactttctctcatggataggaaattagttgattaatatgaatagaaacaagtattaaaaaattattaaggattcataatgacaatcgttaagataaataaaatataaatatttcatttatcctaaaacacagtaaacaaataagaataatatgagtaatatatagtaatttatatttagaaatagtagcaacctttatatataagaaataaagaatagtgtagaaaactttgcactagcgaaaccttgaggaggagagaaaaatgaaaatagaatcattattagttcatggtgcaattgatggggatgagacaacaggatcggtgaatgttccaatctatcaaacttccacatataagcaagaacagttaggtaaaaataaaggatatgaatattcaaggactggaaatccgacaagggaagcattagagaaaaccattgccttgttagaaagtggaagcggtggacttgcatttagcagcggaatggctgctattacggctgttttatctttatttcatagcggtgacaaagtgataattccaagtaatctttatggaggaacttttagagtaattgataaagtatttaagaattttaatcttcaatatgagatagttgacttttctagactaaatgatgtaaaaagaattttagaaaatggaaaagacaactcaagtataaaggccgtttttattgaaactccaacaaatccgctcatggatattactgatatagaagaggttagtaagcttgcaaaggaatatggagcacttactgttgtagataatacgtttatgtcaccatatttgcaaagacctttagaatttggagcggatattgttgttcatagtgctactaagtatttaggaggtcatagtaatgtagtagctggattaatagctgtaaataatgatgagctttgggacaagttacactttatacaaaattcaacgggaggagtacttggaccatttgattcgtttatattgcttcaaggcataaaaactttaggtgttagattggataggcacaatgaaaatgcagagaaaatagcacaatttttatcacaaagtgaatatataactaaaatttattatccaggaataaaggattcgaaaggatatgaaattcataagaaacaagcatctggctttgggggagtattgtcttttgttataaatgaaaagatagattacaaaaagtttctaagttcactaagacttataactttaggagaaagcctaggtggggtggaatctttaatatgtcacccagctagcatgacacatgcagcaattccatataaaataaggcaggaggttggaattgtggataatctagttaggttgtcagtagggatagaaaatattgatgatctaattgaggacttaaacaatgcatttaaggagagtttgatatgaattatgtaagtgatgtaaaagaacttattggaaatactccgcttataaaactcacacatatcaatgttaaaaaaaatgttaatatatttgctaaacttgaatgttttaatcctggtggaagtataaaagatagaattggagtaacaatgattgagggggctgagagaaatggaagcttaaagaggggctatacaatagttgatgcaacagcaggaaatactggtcttggtatagcacttgccgcaattaatagaggctataatataatctttgtagtaccaaccaaattttcaatagaaaagcaaaagctaatgaaagctttgggggctaaaatcattaatactccggatgaagaaggtatgcttggagccataaataaagctagtgaattattaaaagaaattccaaatagcattagcctaggacaatttgaaaataaagataatcctctagcacattatgaaacaacaggccctgaaatatataaatcattagatgggaatataaattattttgtggcaggtgcaggaagtggaggcacatttacgggaatcataaaatatctaaaagaaaaggataaggatattaaaggagtactcgcagatccagaagggtcaacaatggtcggtggagagcataagagttacaaaatagagggtataggaaatgattttgttcctaaaacaatggatatatctttagttgataaagttataaaggttaatgatgatgaggcttttaagaatgtaaagttactggctaaaaaggaaggtttaatagttggatcatcatctggagcaatacttgcagcagcattgaagttatctgaggaaatcgatagtggaaatatagttgttgtttttcctgataggggagatagatatttaagtacaacattgtttgatgactaagtaatgcaaataaattaataagctatggaaataagagtataaggacaagattttgattttggatgggaaaaaacttaactatgataactttattaacgaagttgactagaaaactagagactgagtttcttgattatacattatttagtatgcaagagactcagttttattgtccataaaataaaattttaggagggataaaagatatggcatataaaaagatcaatctggatattccagaggttgaaagtcgtgaacaaagacttggaactattattgcatgggatggaaaggcatcagaactatcagagcaatcttcttatgaacgcagaggatgcgagggcagaggtaaacaatgcagactttgtgaaatgaaaggaccctttacacaaggatcagtttgtagcgaacagatggttgaatgtcaagctggaaacgtaagagatgcagtgcttattcaacattcacctattggttgcggagtgggacaagtaccttataattcaatttatcgaaatggacttgcacttcggaatttaccagtagaaaacataagaattatttgtactaacttagatgaaagtgacatggtatttggaggtattaaaaagttaaaacaatcaattaaagatgcttttgaaaggtatagtcctaaggcgatttttttaggtacgtcatgcgcgacaggaatcattggagaagatatggagagtgtggctgcggaagcagaagatgaaattggaatacctgtaattccacttgcctgtgaaggctttagatcaaaacattggagcacaggttttgatgctactcaacatggaattcttagaaaaattgtacgtaaaaatcctaaaaagcaggaagatttaattaatgttataaatctttggggatctgatgtatttacaccaatgttaggagagctaggattaagagtaaattatgttgtagatttagcaacggtagatgatcttgcacaactttcagaagcagcaggaacagttgggttttgctataccttgtcatcgtatatggcagcagcattagaacaagaatttggggttccagaaataaaggcacctcaaccttatggctttgcaggtacagatgcttggattcgtgaaatagcaagagtcactcatagagaggaacttgctgaagagtttatcaaaaaagaacatgaaagaataaaacctaagttaaaagaacttagggaaaaacttaaaggcgtaaaaggatatgttgcaactggttcagcttatgctcatggtttaattattgttttaagagaactaggagttgaagtaaatggttctttagtatttcatcatgatccagtttatgatagtggagatccaaagcaggattctcttaaatttttaatagataattatgatgatgtaccttcatttagtgtaagtaatagacaacaatatcaattttatggactcttaaaaaagacaaatccagacttcatattaataaggcataatgggctcgcaccattggcatccagattaggaataccagcggctccactcggagatgaacatcttgctattggatatgatggaatggttaatttaggagaagctgttttggatgtactcgcccataggaaatttcatcaagacctaaaagaccatgtaaagctgccttatacccaatggtggcttgatcaagaggatccttatattcttgcaaaaaaaccagaaatattaaatgaaaaaataatataattgatattttttaaaggaggaagttatggagattaacaaagacgtaaatattactcaaacaaattctataaatcaagtgcgttatggttgcgctataggagctatttacagtgtatcatcaattcctggagcaatgcctattgtaaattgtggtcctggttgtgcagataagcagtatactggtctcgcattttataatggttttcaagggggaggatatagtggtggagcagtatcgccgagttctaatgcaggtgaaaatgaggttgtatttggtggagagaaccgtcttagagaattgattaaatcatccttaaagataatggatgcagaattatttgtagttcttactggatgtataggtgaaattgttggagatgatgtaggagcagttgttggagaatttcagaaaaaaggagctcctgttgtatatgcggaaactggtggatttaaaggaaataattttataggccacgaattagttacaaaggctattatagatcaatatgttggagaatatgatggagaaaaagaaaaagggttagttaatgtatggtcgcttttgccatatcaaaatacattttggcgtggagatctcacagaaataaaacgtgtacttgaaggagcagggcttaaagcaaacattctatttggaccagaatcaaaaggagtaagcgaatggagagatatacctaaagcacagtttaatttagtgctctctccttggcttggcttagacactgctaagcatctagaaaataaatatgaacaaccatttctacacatccctactgttcctattggagcaaaggaaacaagtgcatttttgcgtaaagtagttgatttctccggaatagataaacaaaaaagtgaagattttataaaagatgaagaaaaaaattactactattatttagaacacttttcagatttctatgctgaatattggtggggcttaccggctaaatatgcagtagtgggagatagcgcttataatttagctctaaataaatttttagtaaatcagctgggattaattccggctaaacaaattattactgaaaatcctccagagcagtatagaagagcaattgcgggtgagtatagtaaattagcagaagatgtatctgcagatgttgattttgcagaggatggatatgtaataggacaattgctaagacagacagacttcgggcataagccgcctattatatttggtactacatgggaaagagatacagctaaagaattaaatggagcaattattgaagtaggttttccagcctcttatgaagtagtactatcaagaacttatattggatataaaggagcgcttaatttattagagaagatttatactactgcaattagcgctagtgcataaatttcattgtaaaaatctttaaacataaaataagtaaaaaagtttaagaaaataatacgaattattaagtatatttaaaatttaaacagtttaattatgaagtcatttatagatatccttttgataaaagaggatatctatttttgttaagtaatgcctaaatatgtatattttaattgaattttttattactagacttattttagcatttggagtaacagaattttaaattaaatttattattgcaacataatataaacaattcaaatattgccattttttaattaactaaactatagtatataaataaattagaatatatatgtcaatactaatattaaaataagataaaatctatattgtacaaggttattgtggtagtatataggtatataggaataaaatatagtaatagtataatggaggaagaaattatgggaataaaacaaacattagcaagttttatgaaagaacctgcatataggccaatggacattgaagagttaattgctgtatttgatataaagaaaaatgaatataatgcgtttaaaaagactttaagaactatggaaaatgaaggacttattataagaactaaaaaagacaagtatatgatagctaatgcgaatcatgaagaagaaggtcttattataggatcgcttcaatcacattcaaaaggttttggatttttaattccagaagaagagggacaaaaagacgtatttataccaagcaattgtataaatggagctatgaatggtgataaaatatctgttagagtaacaagagaagatacaaagaccaagaaaagagaaggagaagtagtagaaattattgaaagaaacactactagaatagtaggtgtatatgaagattctaaaaattttggttttgtagtttctgaggatccaaggatatctaaagatgtattcatctcaaagaaggataggaatggtgccaatgatggagatgttgttacagttaagataacaaaatggcctgaggaaaatagaaaagctgaaggagttgtaacagaggttttaggaagaaaaggtgacagaggaatagacattctaatgataattaaaaaacttggacttccagaagaatttagtgaaaaagttcaaaagtatgctgaaggtatttctgatgaaattgatgaagaagaatataaaggcagaagagatttaagagatttgagaatggtcacaatagatggtgaagatgctaaggatttagatgatgctgtatctatcgaaaaattaagtaatggcaactttaaactaggagttcatattgccgatgtaacacactatgtaaaagaaaatagtccattagataaggaagcattaaaaagagcaacatcagtttatttaatagatagagttgttccgatgttacctagaaaattatctaatggaatatgttcattaaaccctagagtagatagattaacattaacttgcttcatggagatagatcataaaggaaaagtcgtagaccatgaaattgtagaatctgtaataaaaactaatgagagaatgacatataaagatgtcacaaagatattaagagataatgatgaggaacttataaaaagatatgactatcttgttgatgactttaaaatgatggaagagttatgtggtatattaagaaataagagaaccaaaagaggtgccattgattttgaaatagcagaagctaagataacacttaacgagttaggaaaaccaattgagattaaaccgtatgatcgtgaaatatcaaataggatgatagaagaatttatgttagcagcaaatgagacagttgcagagcatatgtttggtactcatctaccttttgtatacagaatacatgagagtccagatgaagaaaaattagctaaatttaaagaatttgtttataatttgggatatgctattcaatggacagaagaaataagaccaaaaagttttcaagagattctagaaaaggttaagggaaaaaacgaagaaacagttgtaagtacacttttattaagatctatgatgcaggcaagatatgcaccagaatgtagtggacattttgggcttgcagctgagtactactgccacttcacttcaccaataagaagatatcctgatttacaaattcatagaatcataaaagaatatttgcatggagaagtagatggaactagaataaataaattaaaaaatatagtaggttatgcagctaaacaatcttctgaaatggaaagaaaggctcaagatgcagaaagagaagttgatgatcttaaaaaagctgagtatatgcaagagagaattggtcaagaattcgaaggaattatatcttcagttacatcttttggaatattcgttgagttaccaaacacaattgaaggtttagttcatataacagatctagatgatgattattatatattcaatgaagcaaatttaagcttgattggtgaaagaactaaaaagttatataaacttggagataaagtaaaagtagaatgcgttaatgtagatataacaaatagagagatattttttaagattacacaagagccaaagagagaagaaacagataaagattttgaatcagaaggaaaaattagcgaagtagaaaaaaagttagttgaagtataagatatgattttaatgttctgaaagagcaaaaatttgtgcatataaacttattttgagcgttcatatcagcaatgttcaaaataagttgatttacagaaatgggtataatataattttagtagaaatataaccatagcgggtgattatgatggcaagaaaaagaaatgagaattcattagcagaaaatagaaaagcaaggcatgactattttgtagaagaggcaatggaagcaggtttggttttagttgggacagaggttaaatcaataagaaatggaagagtgaatcttaaagactgttatgcagatatatataatggtgaaatatttgtaaagaatatgcacatatctccttatgaacaaggaaatatatttaatgtagatccattaagagagagaaaattacttcttcatagagatgaaataagaagacttgatggtttagtgtctagagatggatataccttaatacctctatcattgtatttgaaggacggaaaagttaaagttgcgcttggagtttgtaaaggtaagaaaaattatgataagagagactcgatgttagaaaaagctcataagagggacatggatagagcaattaaggaaaagaataaatattaattaagcatgctaccgaaagtataaaaatatttttggtagttttttatttggttaaaatacaagataatatggggtttttagataaaattattatagaaataatctgaataataaatgggtgacatttacaataaatatactattacaaaaatatgtgtcatataattttttgtaagtaataatatgtaaatgagattagtattaagggggaaataattgtgaaaaaacttctaaagttcagaaaagttatatcaatttttactagcttattcttcataattactttatttagctcgttttctataagagtttatgcaactgagaatgaaaaaatgtttgacgttatcgaaatcactgattttcatggaacacttaatgattcatcaggaaatcaagttgcaggggttttagcagatagaatagaaaaagtgaaagagtctaataaagataggacattgattttaggtggaggtgatttgtatcaagggtctgcaacatctaatatcatgaaaggggttcctgttcaggagactatgtctaagattggaatggagataacaactcttggaaatcatgagtttgattggggattggatacaactacaaatacaacaatgaagggtgcagcgtattcaatagtttgcagcaatctttacgataagaagactggcaagcgtgtatttgatccatataaaattataactaaagatggcataaaaatcgccgttataggaggaataacaagagaaacagagatgagtgtatcacctaaatttgtgagtgactataaatttacagaccttgcaagtgaaataaatcctattgcactacaaataaagaaagataaattggcggatgtagtaattgtattggtgcatgaaggtgataagggtgataatgcaacagggccagtatttgatttagctaataaccttcagaatgtagatgctgtatttggtggacatagccatactaaaactgctgcaattgctaagaataccaatatcccagtatatattgggggatcaaacggtaaaggatatatagatgctaaattcaaggtgactagtgataataaaatcgtatttgatcagccaaatcttgaaacaagttatgtggcgctagataatgacaaaggatataaaactggaacaccacaaacagacagtgatgttgataaaattgtagataatgccaataaacagatagagccaatgacgagtgaagttattgggtataatacagaaaaggatttaacaagaaaattagatgcttctccatatggatcatcagttttaggaaattgggcatctgacgttacaagaaattctattaaagctgatgttggatttcaaaataatggaggtcttagaatagatattccacaaggaaatattacagtcggaactatgtggcagttcatgccttttgataacacaatttataaattaagcatgacaaaatctcaattaaaagaagttctagagcaggctgttgcggataacagtaaggggttacaggtatcgggaattaaattcggctatgattcaaatcttccatcaggtcaaagagttaaatctatcacaaaagaagatggaactcctattagtgataacgaaagtttatctgttgcagttccagattttgtggctcaaggaggagattcgtttactgcatttacaaagtacggtggattagatgttaaaaatgatactcatgttttagtaagagatgcatttatagattggtgtaaagaaaataaagataaaaatgataaaaatacaatacctaatactgatataccaagaatggttaatatgtctagttcaataactttattagcaacaacagatgttcatggtacagttttaaattatgattatggaacaggaaaagcaccatctaaagcacagggattagctaaagtttcatcatatgttaaaagtgtaagagaaaataataataatgtgatgctaattgataatggagacacaattcaaggaacaccactatcatattactatgatattttagacactactttagagcaccctatggcaaaggttatgggagctatgaagtatgattcgtggacactaggaaatcatgaattcaattatggattagatgtattaaatagagtgattaaagactataagtcagaaggaatagaagtacttggagccaatatatataagaacgattcaacaaattttgtagatccatatataatgaaaagtttttatgttaatggtaaagaagtaaaagtagcggttataggtttagaaaataaatgcataccaagttgggaagataaaaaacattacgatggattggtatttaatgatcttgtagatgaatctaaaaagtgggttaaagaagtaaaagccaagggcgcagatgttgttataatttcagcacatagtggtcaagagactgatgcagatgttataccagaaaatgaaattaacgcaatagcaacacaagttgatggtatagatgcaattatagcaggtcacacacatttgaaagtaaatgatctaactaagaagaatccagaaggtaaagttgttccaatagttgagtcaactaagggagctacaggtttggcacaagtggatatgaactttgatggaaatgcaaagcttataggaatttcaacaaaaaacattgttattgataatagcatagcggatgatcaggagattgtcgatttaattaaaccttatgaagatacaacattaaaatatgtagatacaaaaataggaacttcaaccggagaatttacaggaagtggacaattaactgagcctactgcaattatggagctcattaataaagtacaaaaagaaagtgctgggactcaattatcaattgcggcaccattaagttctggagcatatatacctcaaggcgatgttacaataaaagatatgatggcagtatatgtatttgaaaactttttgtatggagtaaaaatgacaggaaagcaattgaaagactggatggaatattcagttagatattatgatcaaacaacaggggataatgcagcagtaataaaagatccaatattaaatattccagattataacttggatcaattatatggtgcaacatatgatattgatttaacacaacctgcatgtactatcgacaaggaaacaggaagagtaatatcaggaaatagaataaagaatttaaaggttaatggtgtcgaagtaaaagattcagatgaatttacagttgctataaacaattatagatttaatggtggtggaggttttatgaaggccgctggattaagtaatactgattcaagtattattgtctatgattcaggaaaagcacttggtgatgatggtcaagtgagaagtctaatgactagctacattaaaaaacatggagagatatctccagattgctcaaataattgggagatactgaatgtagataaacagaaaaaagcagcgtaagatctgaagcaattattttcaggcataaataaatatatatataagtgattctggtaaaaatgaagccatgcacatagatagatttatctacatgtgtatggtttcaaattctattgaagaatatttattatttcttatactgatatttttattagcctagatattgattttgaatatttgatagaaatatatagcatatacaacagatttaacaatataaatataaaataatttaatatttatactataaacttaaatttattaattaatttcataaaaaaatcttgcaatatatgcagaaagtatatataataaaaccaatccgattacaatacttggatttgaaagagcaaaaggttattctatagattttgacaaattaaaaaaagttgtatataattaggtcaaagctaaattaaataatctgaatatcttatcgagagcggtggagggactggccctttgaaacccggcaaccgaagtattattttttactaaatgatatttatatggtgctaattccagcagcttttagctgatagatgagaggataaatttgtatggtgttttatgcgctagagatttattctctagcgcttttgttttgaggtgaacgttaataattaagttaattattacatcaccttagttatccggaaactaacaaaacaaagtcaaaggaggaaatgtgtttgatagaaatcaaaaatgtggtaaagaattttggggaaacacaagttataaaagatgtatcaataagcattaaagagggcgaaatttatggaataataggacacagcggagcaggaaagtcaacactattaagatgcattaatggacttgaatcttatgatggaggttcaataaatgtaatggggaaagaggtttcatcattagaaggaaaaagtcttagggaatttagaaaagatttggggatgatttttcaaaatttcaatcttatgcaaagaaaaaatgtttttgataatgttgctcttcctcttgaagtgtgggggtacaacaaaagtgaaattaaggacaaagtattaagattattagatttagttggattaacagacaaaaagctaagcaaaccgtcagagcttagtggtggacaaaaacaaagagtagcaatagcaagggcattagcgttagaccctaaaatactactttgtgatgaagcaacttctgcattagatcctaaaattacaaaagacattttagcattactttctaaaataaacaaagaattagggattacaatagtaatggtaactcatcaaatggaagtaataaaagaagtttgtgaaaaagttgcattgctagatggtggaaaaataaaagcagaaggaagatcagaagatttattcttacaaccaggaaaatcattaaagaaattcttaggagaagaagatgaaggaatattaccagaagaaggtgttaatatcaagatattcttcccaagtgattcttctgaaaatgcactaattacaaagatggcaagggaattagagatagatttttctatagtttggggaaaacttgaaaaatttaggagcgaagtattaggtgggcttgtaataaacatcaacgaagaggataaggacaaggttataaagtaccttgaaaataaggatatcttattggaggtgatcgaataatgaatcaggtaatagtaaaagctttaatagaaactctagagatggtttttgcatcgactataggttcacttattttaggattcatacctgcaataatattaacagttactgcaaaagacggattaaaaccaaataaaatagtttatacagttttagatttaataattaatatattaagaagttttccagttattatattaatggtagcaataataccattaactagatttattgctggtaaatctataggtacagaagcagctattgttccacttacaattgcagcagcaccatttgtagcaagaattatagaatcatcacttagagaagtcgataaaggaataatagaggcggcaagatcttttggagcatcaagcactcaaattatctttaaggtaatgcttaaagaagcaattccttcaatagcatcaggaattactcttacaataataagcattgttggatattctgcaatggcaggaactattgggggtggaggacttggtcaagtagctataagctatggatatcaaagattccaaactgattatatggtagtaacatgtattgtgttaatcatagtagtacaaggactacagcttataggcaattatttttacaataaattatcaaaatagggggaataaatatgaaaaagaaatcaattttatcagtagttttagcaggagtagtgacactaggattagtaggttgcgggggcacagctacttcaggaagtaaagattctaaaaatgacaaggtaataaagattggggtaacaccaaagccacatgaagaaatagtaaatatagctaaaccattacttgaaaaagaaggatatacagtagaaataacagaatttaatgattacaatcaacctaacactgctgtagaagaaggttcattagatgcaaacttcttccaacatactccatacttaaatgaacaaaattcatctaagggatatcacctagtttcagttggtgcaatacatttagaaccaatgggattatattctaagaaggtaaaaagtttagatgaacttaaagatggagctacaattgccgttcctaatgatccatcaaatgaagctagagcattaaaattattagcaggaaaaggcttaataaaaattaaagatggagaactagttacatcaaaggatattactgaaaaccctaaaaacttaaagtttaatgaattagaagcagcagcagttccaagagcaatagatgacgttgatgctgcagtaatcaatggaaactatgctatagaagctaaatttaatccagcaaaagatgcaattattattgaagataaggcttcagaagctgctaaaccttatgcaaacatagttgttgtaaaacaaggtaatgaaaatcaagaaaaaatcaaagctttagtaaaagctatgacatcaccagaagttaaagaatttatagaaaaagaatacaatggttcagtaattccagtattttaatagttcattttgaacatatagattgaaaaaagaaattgaataataactagtatttgcagcatgaatatgctgtattacaagaagagaggctatgccaaatgtcatttaggcaacaaaatgacattaaggcatgccttctttttttatcagaaagttaaatgggggcttttgctattaagaaaaattgtagattctatatataacatatctttaataattttctggaataatgtatacttttaagtatatttaggaaaataatttgatttaatttatataaaagtaagaatttactctaaaggggaataaaaaatgaacatatcagaagtaaaagttaaattaactggtaatgatatattaagtataatcaatgaatttgttaaggttgatgggttggatttaagaacagtaactattaatgatggaataatattagaaggaactttgaaaaagggaataaatatagactttaatataaaggttcaattagttgggtgtgttcataacaaaattactgtaaagatagttaaagttaaagtattaaatgttggttttcttagaatattaagaagttttgtgataaagcaattagcaaaagcttttaaaaagtatggaatagatagtgatagggataaagtaataattgatataaatacaatacttcaagatgtaccatacataaatctaaatattagtgaggtcttcatgaaaaaatcagaggtatgggctgaaatttctaatgttgaggtttcaatactaggagaattaataaaggaaagtgatattgaagaaacaagtgaagaagaagagattgatgtagcatcattggatcttatagataaaactaaagattgctattctgtcggaagaaataaaattacaaataaattatctggaaatgtgagaaattataaagagtatatatttgtattgccagatatagcttctttaatatatagattacttaaggataaaagagtatctataaagactaagcttataatgtcggcaggaatagcatatgtaactgtaccagttaacataatacctaatagtataccatttataggtgtgattgatgatattggagttatattttttgttttaaataagattattaaagatataccattatcgataatagtagagaattgggaaggtaaaaatgatatacttttagtattaaaaaaaggaatagaatatctaactaactttacaaatgctgcaaatattgaaaaattatatagtgctgtagaagaattatcatcactatagaaaatattatttataaatttaataacatatagattataagtttataaatattccatgaaaagtataataataagttagacggtcggagaaaggaataatatatggcgaaaaaagtttatgcaatacaatatggttttgatattaaaaataacaaaaaggttgaaaatgtaatagtcaatacttggaatgaatgcttagcatatgtaaaaggggtaaagggagcaaagtataagagtttcgaagacatagaagaggcaaaatcatatctaaacgaaggaaatagaatgctaaaaaagagtgatgaaagttatccaaaagactgtcttcatgcatatgttgatggaagttataattcttctgacggaagatattcttatggggtagtttgtgttaatgatgatgttgtagaatatatagaaagcggagctgaaaaagatagctcttctaaaaatataagacaaatagcaggcgaacttaagggagctgttagagctgttgaatatgctttagaacatggacaaaaaaaagtagttctatttcatgattacgaggggatagctcatcatgcaactggagcatgggaacgaaaagaagaatcatctatgcaatattataaaaagatgcaagagttaataaattctggaatggaaattatatttgtaaaagttgatagtcatactggagatttatttaacgagcttgttgatgagaaatgtaaagagtgcttagggataacttctgatagaaccgttgaaaaatggttaagtaaaaatgttataagagtttctggtactaaggttaaagaagaaatcttaagcatagctccaagtcattcaaataatataattttaattggcgaagatgaaaatctacaaatggaaaatatattgaatgtagataagaaagatgacaatgaaattagatttgaacaaattattggtttatatagaaataacgctatcgaaggcaaaaagataatttctaagctattaagcaaagaaaaagaaaaattaattttttatcttcttaaagagtacgttgataataattaaaccagtatatatgttggaataatagatttgcatttaaaatgcaaataagaaaaatgcttaattaggactggaatatagaaagctgattgtaatatgcatagttactttttagaatatttttaaaactgtatataatcatggaataaattaacttggataactttttgattaatacacaatatatttatagaaaataaattgatgttaaagaggtgtttattatggaaagattttctaagggaatgatgactggatttttaattggagttgctgtcgaaatgtctctaatgccacgtatggatagaaggagtcaaaaaacaatgagaagagcaggcagaagaatgaggaatatggctgaatcagtaggtcatgaagtttatgattggatgagatagaattacaaaaagaaagtataatatgtaaaaattaggtataacaaaaatagaagggcatgaatttctttcatgcctttttatttttatttattgtatttatacttttgtacataaatatggataataaaattaaattatataaaatttggggcacatttatatttttatgcagttttttataaatttatgttataattaaggaaattatattaaaataactaaataatttgttgaatagagaaggattaaaaagatggaaattctatcattgggagaaaagatcaagagaagaagaaaacaattgaatatgacgttgaaggatttggcaaaagacagaataactccaggacaaataagtttggtagaatctggccgttcgaatccatcagtagatttgctagaatatttagctgatgcattgaacacaaatgtagaatatttaatggaatcagaagaaagccaagctgaaaagattagtttatattacgaacaggtaggggaatcatgcatactccagggagattacgaaaaaggtcaaagatatattgataatgctctatactactgtgaaaaatataatctagaatatagaaaagcaatgatatattttataacagcaaaatcctacatgtataaaagagattttcctatggctcagaagttttttttatcagcaaatgtaatttttgtaaaaaataataattatgagcagataataaaaactttcctacatttagctaatattgctttagaattaaaggcatatcattcttctagcagttacttaaaacaggctgaaaaggtatatatagacaataaggttgtagatgaatttttaatgggagaaatatactacaatatggctagaacatattacgatgtagaagaactggatttagccttagaatattcttgtctagcaagaaatagatttgaacaagtctataatgatgaagattatgcgagaaatctattctctttagcagaagaatttaataaaaaaggtgacttgccgaatgcaataaagtattcaaagaaaacattagaagtatataaaaagatacagtataacaagagcatagttaatatagaacataatttaggaaagttattttatgaactaggaaatttagatgaatctcttaagcattatgatatatcaaaaagtattagtacacaaaatcgtgtaggatgtataaatgatatactaatagatatttgtaaaagttatctgaagttaaagaatactgaacaatgtagcaaaatactaaaagatatagaaaatagaattgaagagcatgatatagacagaaaaatcgaatgtaaactaataaaatatactatgttcaatattgacgataaaccagaacaagcagaaagtgtattgattgatacatatgtgctagcaaaaaatagcggaaagttgtcgaaggctgctgaattagctatgagagtcggaaaatatttcatagataaaaaagaagaagaagaggcttcatattacttaaatcaaggaataaagttatttgatgaagcagaaaagttagaaaattacaaattataagtaagtgggtgagatatttggaaatactatctactggcgaaaagataaaaagagctagagtatttaaaggtataacattgaaagaattatgcggaaataagatttcaattgccaagatgagctgtatagaaaatggaaagattaaggcagataccgaattactgaattatatagctgagaagatagaaatagatgtagattatttaatagaagacgtatatgaacaaatttcaaataatctaaatataataaagaggaatgtatcttccgatactgattctgaaagtaagttgaaagataacctaagctatgcactaaaatataaatattatgatttagcttttgaattaatacacatattattctcgtattatgtagaagaaaataaggttgaaaatattcagcttatagtttctcaatattatgatttatatcaaagaaataatacggaagaaaatacagctatctactttaaagatatggcacgttatttatctcaaaatggtgaatatattgaggctatttcttactacagcaagcttagagaaatgtttagattgaaagaagatggatttgatagttcagagtactgtttaataggctacaatgaggctctgtgttatcagaatttaagaaaatctgaagaagcatatagcattttatcagaaatcataggatatgttgatgaccttaaaacagatgaaagcaagggaaaaatatatcatatatatgctacagtatgcattaagcttaaaaaagattatgttgatgaatataaaatgaaagcatttcaatatcaaaaatataatcctatttctctggcagcatctcatggaaattatggaaagtattattttgaagtagaagaaaaggaaaaagcaatctctgaaatagaagatggaataaagatatttccacaagataatgtagaaaaatatgtggagtttttgaattattgtacaagaatattaattgataattcagagtatgagatagcttataggattacagaagaatcattaaatttagctattatgactgataatataaagttaattgagaagtcatattattttaaaggtataattcttcagaaaatggacaaacatttggaagccgaaaaatatatgaatctatcattagattcgttgtttaaatttggtaccagagaagaaagaagaaatagatatgtagatatgggtaagctttattataagcttggacttacagcggattcgctaaaatactttaatcttgcattagctgttgataaaaaaatctaatttctcgtaaatatatatagaagggcgatattttgttaattcgattataatggattaacaaaatatcgccacttctatttttttatattcacaattaagcctttaagatcagtaatgatatatttaagctattaaattcatatggacattattgttactaattttttgaacaagagtcaatgaagtaatctaataaatcatctatattaataactcctacaattttttcgtcttcaataacaggcattgttataatatcattttctcttagacgcttagctacagtgagtagatcttcgtcagattgcgcagagataactgattttgacataacccactcaactggacagctaacataatgtcctggatgtatcatgaatctatatatatcagcttttactatcattcctactacaatttctttatcatctactactggcattccattaatattaagtttgtccataaaatctaaagctttatctatagtatcgtttacattaattgtatggaaatttggtttaatgatagaacttattttcataacatcacctcttttaaaaaagtttaatatcgttaagctgtaaaataacaggctaataatatttatattactattttactataaaacaacaaaatttaaaataaatctttagatgataaaaaaatttaaaaaaaagactgaataaactttgactttctttgacctatgtattattatatagataaagaggaattattcaggtatagtgataaactagttctaataatgatttcgaaatttaacatagagatttaggaggaataagtatgaatattgataaaatgacgttgagagttcaacaagcattgaatgatgccaatgttacagctgttaaatttaatcatcagcaaatagatttaattcatcttttttcagctcttgtagagcaggaggacgggttagttcctaatattcttactaaaataggtatatcagtaaagaatttaaaagcgtcagtaaataaggaattagatgcaatgccaaaggttttaggagaaggagttggcaatgtatatataactagaaaagtagaggaagtgttaattaaagctgaagaattttcgaaacagtttgaagattcatatgttagtgttgaacatttaatgcttgctattatagaaatagataacaatcaagtttctaaaatattaaagcaatataatataaccaaggataatttcttaaaagttctttctgaagttagagggagccaaagagttgaaacgcaagatccagaagggacatatgacgcattagcaaagtatggaactaatttagttgaccttgctaaaaagcataagttagatcctgttataggaagagatgaagaaataagaaggacaataaggattttatcaaggagaaccaagaataatccagtattaataggtgaacctggtgttggtaaaacagcaattattgaaggattagctgaaagaatagttagaggagatgttccggaaggccttaaggataaaattatatttgctttggatatgggatctttgattgctggagctaagtatagaggtgaatttgaagaaagattaaaggcggtattaaaagaagttcaaagcagtgagggtagaatattattattcatagatgaaattcatacaatagttggagctggtaagactgatggagcaatggatgctggtaatttaattaaaccattattagcaagaggagagttacattgtataggtgctacaacttttgatgaatatagaaaatatattgagaaagataaagccttagaaagaagattccaaccagtaattatagatgaacctacagtagaggatacaattgcaatactaagaggattaaaagaaaggtttgaaatccatcacgggattagaattcatgattcagcaatagtagctgctgcaaagctttctgacagatatattcaagatagatatatgcctgataaggcaattgatttaattgatgaagctggagctatgataagatctgaaatagattccctcccaacagaacttgatgttataagaagaaaaatatttaagttagaaatagaaaaagaagccttgtcaaaagagaaagatgagggttcaaaaaataggttagatgacttagagaaagagcttgcaggattaaaagaaaagaatgatgaaatgactgcaaaatataccaaagaaaaagagcaaatcacagctattaaaaccttaaaaagtgagctagatgatgctagaggagaaatagaagtagcgcaaagaaactttgattataataaagttgctgagattcaatatagtaggattcctgctatagaagaaaaaattaagcaaaaagaaattgaactaagagaaaattatgagggagctctattaaaagaggaagtaactgagcaggaagtatccgctgtactttctaaatggactggaattcctgtaactaacttacttgaaggagaaagggaaaaacttttaagactagaagatgatatgagtaatagagttataggccagggtgaggcaatagaagctgtaactaatgcaatactcagggcaagagctgggcttaaagatatcaatagaccaataggatcatttatattcttagggccaacaggagttggtaaaacggagcttgcaaaaacactagctagaaatttatttgattcagaagaaaatattattagaattgatatgtcggaatatatggagaagcattcagtgtctagattagttggagcgcctccaggatatgtaggttatgatgaaggtggtcagctaacagaagctgtaagaagaaaaccatatagcgtaattttatttgatgaaattgaaaaagcgcatgaagatgtgtttaatatattccttcaaatattagatgatggtagattaactgataataagggtaaaactgtagattttaaaaatactataataattatgacttcaaatatcggaagtgaatatttattagaaaatactaatgaagatcacgttgatgaagaaataaaatcaaaagtaatgagtgttttaaaatcaagatttaaaccagaatttttaaatagagtagatgatactataatgtttaaacctttgacagagtctggcattaagaaaattatagatatattcttaagagaagtaagtttaagactaaaagataaaaatatcgaaatagaagttacagataaagcaaaaacaataatggcaagagaaggttatgatgtggtttatggagcaaggccgttaaaaagatatatacagaacactttagagaatagactcgctaggatgataattaagggtgaactaggctatggatctaaggttgtgattgataataaagatgaagaaataataataaaaccactttagtaaaaaataagttttgtaaaattcctgtagataaatgtgatctataggaatttttattctctagaaaattataatcaaaaaaatgtgagtaactttttaagtagtaaataggaatcggtatatttgtattatataccatattttaattcttcataatagttttatatataaccaataattagaacaagaaaagaggcagcttttagcaagtgcctctttataatttatattctttaaaaaatattttattttacttgtttagagtttagttaaatttttttcttaattctaaatatagctacaattacagggactgatattacagcactcactatagcttcaggaactccatttgttaaaccaatggttgcaattgcaattccagcagtttgtggatttatctttaaaatagcagagtatctttctaagtaaaatacgtaagttaaacccaaaacacctatagtgttaattaatgtagcacagattgatgctattgcaatactaatgctttgatttttaaatctctttctaagaagtatatacacatagtatgctacaattccaattaggactctaggaactaatgcaattataggattccaaaatataaatgatgttggaccaggagcggtaaaattttgatacattgagaataaaccaaaaactaatccaactagggatccaactataggtccttcaactatcgcacctataataactgggatatgcattatagtagcttttacaggtggaattggtatgaacccaagcccggttaatcctaagaaaattgaaattgcagaaagcattccgatcattgcaatctgtctaactgaaaatttagatttagtatagcctctttccataaggtacctccgttcttattccttgatatatggatataattcggaaaaatatataatatatacgaatttccgttcagcttctaattgaataccgacacatattattttaccacgttagaaaaaatgttcaattatattttaaaaatataaacttaaatatagtaataataattactgattctatatttaattctacgaacttagaaaaaagttgatttccatacaaaatatgaataaattcacaaatctaatttatggatttaatccataaaaatttgaattataagaaataaaatgataatatataaccataacagaaattgaatagtataaaaggctaggggtgccaatttaattggctgagagaagcttatttgctttaactcttttgacctgatgtggctaataccaccgtagggaagcaataaatattttagaagatttataagacttaccttagggtaagtctttttattatctagtaatttattgatggaaggcaaataagtagaggttctgcccattggtcgtacaaattatgaaaaaagactgctaagaaaataatgagtaaataatgaacagatatattaagttttaaaatttatttagattggggatattagtttgaaagttttagtaaatgaaagagaaatagatattgagggagaaattactgcatttgaagttagaagcaggataaaaagtgatgcggatatagttattttaaatggttttccaattaaacaagattattctctaaatgaaggcgataaagttactttaattaagagaggcgaggtgcctaaaaaagaagagttagaggcactaatggtaagtagacatactccaaaggttcatgagaaagttaagaaggcgaagatagctattgctggacttggtggacttggttcaacagtagcattagcgttgggaagagttggggttggacatataaaaataatagattttgatgtggttgaacctagtaatttaaacagacaacaatactttataagacatattggaatgaaaaaatgccattcattaaaagaaatattgttagaaatcaatccgttcataaatatcgaagttgttgatacgtatgtagataaggataacattaaagatttatttgaggatatggatattgtaattgaagcatttgatggtgcagaaaataaagcgatgatagttagagaagttttacttcagacagaaaaaccaaaggttatttcagcctcaggtatggcaggatattattctaataatctaataatcagcaaaaaaataaatacaaggctatatatgtgtggagattttaaaaatgaggcaaaagtaaatgaggggctaatggcacctagagttggtatcgcagcttgtcatgaagcaaatatggcgcttagattaatattaggagaagaggtataaactaaagatgtctgtaattggaataacaaatagaaaactttgtagggacttttttgatcaaataaaaaaaatatcagaatctaatctagatttcttaattatacgagaaaaagatttaagcagtgaagagctaatgatattagttttgaaagtaaaagaggaactgaaaaatacaaatatcagaataatactaaattccaatatagatattgctaaaaagtccaatgttgatggaattcagttatcatttaatgattttataaatattagtaacaggttatgcacaggaagagcaataaattctaaagaaatggtggataattttcattttagtaggaataaatataaaatatataagatgatcggcgtttcaatacatagttgcgaagaaggtatacaagcggctaaattaggagcagactatgttatttatggccatgtgtttgaaactgattgtaaaaaaggtcttcctcctagaggaattaaggaaatagaggctctttccaagaagattaacattccaattatcggaataggcggaataaatcaagataattataagaaagtattggatgctggagcaagtggaattgctataatgtctagtttgatgaaagacaaaaaccctgaagaactagtgaaatctctttctaaataaacattactttgatatatgaaaatcaaagtacgaatacgaataattaaaatcagctaatattaaaacctaaaaacacttgtaaatcttaagtgttcattataaactctttaaagaaagatatattcaagaacaattagtatctatgatctggatactattaagataataaggagaaatgaaataatgagtacaattgcaggaaaaggctgtccaagaattataccagatggagaaaaaaagccactagaagagattgaaaaagctataattaaaagctatagaaagcatatttggtcaaaatttgttaaggcaattaaagaatataatttaattcaagaaggagataaaattgctgttggaatttctggaggaaaagatagtatacttatggcaaaattatttcaggagttgcaaagacatggtcaagttaaatttgaattagtatttttagctatggatccagggtatcatccagatataaaaaatttactaatagaaaattgtgagcatctaaatattccgattcacatgtatgaatcaggcatttttgatgttgttgataaaatggctaaggattacccatgttatttgtgcgcaagaatgagaagaggctctctttatgcaaaagcaaaagaatttggatgtaacaaacttgcattagggcatcattataatgatgtaattgaaacaactatgctaaacattttatatggtggtaattttaagacaatgttgcctaaactaaaggccaaaaattttgaaggtttagaattaattaggcctatgtattttatagaggaagagtatataaaaagatttataaattatagtggtatatggccattgaattgcgcttgtatggttgcagctgaaagaataggtaataagagatatgaaataaaagatcttattaaagaattaaagaagaattttagcggagttgaaaagtctatctttaaagcagctgaaaatgttagtatggattcaatattaggttggcaaaagggcgaagaaaagcattcttttctagattattacgatgaagagtagacttaagtaactaaaagtatttattaatttggaaatgtatgttatgctataattaaccatataccaatagatgaaaaggaagagtagagatggaaaataatcctatggggatcagtgatccaaacatattgttaagtgtaataaacatgaaattaagagatcaatatggttcattagatattctttgtgatgatttagaattatctaaagacgatattataaatatattaataagtatcggatataaatacgaggaagaagaaaatcaatttaagaattagagtcttaataaataattattcataaagttaggaaggtgatgttatatgaatttaaaaaagacaggcaaattaattactgttatagcagcaacagcagctttaatagcatcattagcaaatgataagaaatctaaagattctaacaaacaggaatagtacaaattatagaattatgtgaaggattgtatatatatgattagggaggaacttcaattaaatcatgaggaaatatttgattctataccaattttgggcgttaatataatttggaatcaatcagagcttaaattaataattgatgatacaatgaaaagtttttttgaagagtatgatactaagaatgaaactttagatcaatttataaattttgttggtgaagaagataaacaaaatgttttaagctttttctctcaagatttaaagagacactatataaatagagaacaaatgcagctacaatacaagatggaaagtcctagggggaacattgttgagtttattcttgtcgggaagtcaattaaaagtaatgaacagtattactttactggaactagttattgctttaaggacttagagaatgaatatggtgatatagattctttgacgaaaaattggaaagaatctatggtcaataaaacaatagattcaataattcatagtgatagaattacagggctacctaataaatattttttcaagaacacggtagccaaaatgttacaaaatgttgttaatagtaatactagagccgcgatgctgataatagatttagataattttaaatatgtaaacgactcctacgggcatgattttggagacttagtgttaaaagaagtgggctataatatagtcgaatctgttacagaagatatattagtatcaagatatagcggcaatacttttctgctatttaagccaaatataattgatatacaagaaattataactttgggtaatgctatagcaaagtcttttgaaaaacctaatatagtgaatggaagaaaaatatacttaacagcaagtattggtgtttctctatctccagatcacggaatagattataatacattactcaaaaatgcagatgcagcaatgtatgaagcaaagaaaaatggtaaaaatgagtgtgatttttttgatgatagcctttctgatgagctaaacagagtttatagcttgcagaaagggttaagaactgcactgaataataatgaattatatgttatgtttcaacctaaagtatcactcgatgattctttggtaaacggatttgaagctttagcaagatgggaaagtcgtgaatttggaatggtaagcccggcggagtttattccgatcgcagaaagttcaaaaatgataattccaattggaagttttgttttggaagaagtattcaaaaagacgaaatgtcttttaaacgagggaaatgataattttaagatagcagttaatttgtctgaaatgcagctcagagaggatgttgttttatcagattttaaaaaactaataaagaaatataaaattcatccaaagtatatagaagtagaaataacagaaagtatgctaatgaaatcatttgatagaaacgttaagatccttcaggagataaaaaaattaggagtaagcattgctttagatgactttgggacgggatactcttcacttaactatttgacaaaattacctatagatgtgctaaagatagataggagttttgtaattgatttgatgaacaatcctaagagtaaatgtattgtagagaatataataaacttatcacatcaattggggatagaagtagtggcagaaggtgttgaagaaaaatcgcaagttgaatatttaagaacaatattatgcgatgttgttcaaggatactatttcagtaaaccaagaatgtttgacgcaattaagaatataatcggtaaggaaattttataaaaagtgttgacaaacactttttgaggatataatataagaatataaaataaatcctatgaagagggatagtaatcatataacaatgttaaagagagctgaaggtggtgagatttcagtacggtagttaatgatgaatgggcctttgaggagcgagatgaaatcttttgagagtagtttagccgtaagtcgcacgttatagcgaataagatatgtttgtatctgaaatgagaggcattttatgcaatctaggtggcaacgcggataatatccgtcctattaattataggacggtttttttatattcttttttagtagttgttaaccaaaagactctatatttggaagcataacaaagaaatatatttaaatattggggcgtgataagtatgttgtgaaagaaagtggtttcaacttaaaaataaaataagcaaagattaacaagggggatttttattatgaatacaaagaaaatggcaacaaatgcaattttaatagcaataggagcaatattacaccaggttacaccaccattcggtatgcaggcagatttctcattagcaatgttatttataataatagtgtttaataaagattataaaacaacattactatgtgggattattatgggagtgtttgcagcactaacaactaaaacaccaggaggacaattaccaaatattatagataaatttataacttgtaatgtcatgtatttgatattaatgcctttaagaaataaagttaataagttagtgcaagtatcaatattattacctttaggaactttagtgagcggaacagtatttttaactttactagcgaatatagtaggattacctggaggattatcgtttaatgtacttttcatatcagtagtcgtgccaacaataatagtgaatacaatatcaggaattataatgtttaaaattgttgaaaagattacatcggtaaatggaagctatgcggtagaatagatattttgtataatttaaagaggctatttcaaaaggattaattttgagatagcttcgttattttacccattattattttttcatgaaatgatattcttcatcagtattttcatcgattgctttaaattcatagccattatctttataatatttaattacactaggtaaagccgttactgaatttttactcatatatgcacaatgcattaatagtactacacgctctttgtcacttttggaatttttaataaatgtacttggactagcattagggtgagcaccatcaccactatctgtattccaatcgtaaatttttaggttattttgatgaagtaaatccaccatagactgcgaaattttataacagttattattacaaccaaaagggaatcttagtatagttggcttaataccaactatggaattaattatttgctgggtatccaacatctcttttagaaattcttcattagagtgataaaggatatttcgattatgactcatactatgaagaccaagggcatgcccttcattatacattcttttaactaaatcttcttgtcctttgatttgacttcctattaagaaaaaggttgcaggaacagattcttgttttaatatgtccaaaacattagtggttacctttccagctgggccatcatcgaaagttagatatattatttttttttcatcagcaagaaccgtatgcataagaagattttgataattaattatagttattataatcaaaacaaaaggaatgtatttctttagcgattttagtttcatattatcaccttcctaaatgtttttacaaaaagtattatgtcctaaaattaaatttatattataagcctttatatacttttggttacaatgataattaagaaggtataattataaaaatatgaatttatgtaaaaaagtagataattaattgaattagatataatagtgttcaggattatgctaaaatatggtataattttagatagattggtaaacttcaagttagtgaagaaaagggatgaattagaattgagaaatgtaaataataaatatctaatagagcatgagatagttattgaagagaatttttcaaattatattgttacagacatagagagagacgcaagatatgttctatgtattttgaaaaatggttttacatatgagaaaacaagagaatatttattgagtaaatttaagactattaaaaatcttaattttgagaacgttactaacattataaatattgaaataatttatagtattaatgggataaaacttgatactcctcaatatgggtatttaatggagtatgtagaggctaaactggatacacaagattattttaataaatgtgactttcataagaaattagatacatttatggagatttgtgctgctatcaatacgctaaacatgcagggatatatatttgatgatattagtatgaaggatgtaatattaattcccgactctagcaataatgtgaaagtcaaaatgaaagatttgttagcaaatgaattaagaaagtttaatttaataaattcattaccttaccaatataacatcgaaacaagagaagatataaattcaaataaagataatattgtacaagttgcagaactgtgcagacaaatattcacagaatcagaacttgaaacaggatttaaaggattagaagatataaaaaatatatataatcgagtgaatactataaataaatcgtttaaacttaaatattttatacaaaatataaacaaaaaaatgaagaagaactatagagtgtttattagtgaggctttaaataagattaaaacggatttagatataataggaatgacagaagaaataaaaatagtggaaaaaaattttcagaggatattggaaaacaagcagagaaataagtttataaatttcaatggtgaagatggaagcggaaaaaccagacttttagaagaaattaaatatagatttgaaaataaatacttcaaagacattatatatattgatgattttaataataaaaatgcaagcaacgaagagcaatataatacaatactaaattacattttaaataaagtagataagaatttgagagataagtatgaaatttatataaaaaaatttatttctatattatttgaaaaaaattctacaaatagtgaaaataataaacaaaagcttcaattgattaatagaatggggaagttcataagtgagtatacaatgactaagccatttataatgataatagatgatttagataaaaaaaatgaagttttcaaactgtttattaaatatataatctttttaagaaataacttagaaaatgttatgataatattttctatgaatgaaagcagtgttgatgaaaatttcataaagttcataaatgaactaaaacaagtagagaagtacgaagaatataaaataaattattttaatcaatataatactactaagatgattagaagtatgcttaatacaggtactgatgttaataagttagcggtaaagatatattcagaaacgctagggaatccacagtatataagtggagttataaatgaattatacggtaatggaaccttatattttgatagcaataatggagaatggaagactaatattaaggttcaagatatacttatacccaaatctctagaaagaagattagaggcaagtattttttcattaaatgaagaagaaattaatattttaaaggagttagctatatttaaaactcctttatcagaaaaaataattttagaatatgtaataatggattctgataatatagaaatttatgataatttaaaatcaaaaggccttttgactgataaaataagtgatcaaggtatacttataggttttagaaataatttattaagaaatatattgtatttaaagctaagtgaagaagaaagaattaaattacactctaaggcatctatttttatggaaaaaattttacttgatacagattattatatagaagaattattattgcatttagaaaaaagtaatagttacgaaaaagcatatttttatacattaaaatacgcagaagctcaggatctgttaggtgatatatcgaaggcaatatcatattataagaaggtattaacatatcctagtgattcaagtggaagtgaagtggcaattaagattgcaaagctttatgaaaaaaaatctaaccatgaaaaaagttttgaacattttgaaaaggcaaatcaaatagcaatacagaatgacgaaattgaaattgaaatatatacgctgcttgaaatgataataataaaaattaatagtattacagatatagatacagggatagattattctttaaattgtgtacgaagattgctagataaagaacactatcctaagggagaggtttattattactatgcactttcattaaaatatagattagaatataacaataaattaacgatgcttaatgcacaaaaagcaataattatatgtgaagaaaataagataaaagaggatgtatatggttgggcagtgagtatccttattaatatatatataaagaaggggaattataaagaggccaaaaatttatgtttatatgcaaacagtatatttattaataacaataatattaatggtcaattatatattaaactattagatgcatctgtctgtaaggaagaaggaagagataacaaggagattttagagcaatatttagaaatagctagagaaggaaataaacagaaagtatacaagagggaaatattgagtctaatttgcatagcagatatttatagtcaggaaaaaagatatttagaagcagagaaatatctattaagagcactagaaagagaaagagaagaggggatagactcttattcatttaatatttgcaatgaactttgtttgttatatataaaatcaggaaggataagtctggtagtaaagtatcataatttaataatgcaaatgcaaaaaggattaaagctattggaagatagaattataaatacaaactatacatatgctttatataatctgatgatttgtaattatgatttggcatatgaccacttgaaaaaaatatatgctctaatatttaatagcaatagttctaagtataaaatagttgtttgcaattactttgagcttattttatataaatgtaaaaatgagagtgatataagaaatgtatacaataagttagagaaaaaaattaagctattacaggatgtagatacatgtctcgaaataaggataagtgctattagaagaattttaacacttggatataagggattggctaaagaattattctttgatctcaatggatatcctaaaaattataatgttgaaggaatttatgtatatctagaactcaattttagaaatagaaatcaatataattttctgataaataaggcactaagagtatgctcttttgtggataatcaggaaattaaagctgatatatattctgcgattggtgagaagtataatgaacttgaatgtaatgtattggcattgaattattattatgaatctatagctttatatatagatacaataaatttattaccacaaaatgataagttatcatatgcaaataatagtaggtttttggaaacccgtaagttatttgtaaaatgcttaaatgaagatttgggtataaatatgagttttaaatcaacacaatttataaaaacaattgaggatttagagcaaatattaaaagaattagatttaatgaatatactagataatgaagatacatttaaattggttcaatatttatatgaaaaatgctattacaatgattttagagatatatttaaagtctttgagaagttttctaataatactattgatgatataaaaaatgtgatgaagtatatggctagattaattttagcagataaggctatgattgttacagagaacgagcagggagaaaatgatgttatatgcacatatagaattagcgacaaaaatgaaataaatagatacctctcactaaaagttgattcagatgaagatacattcgcaatttgcagtaatgaccctagattctatcagttagatgataaggtactgaaagatggaataagatcttgtatgtatatgaaaataataaatagagaaaaacacataaatagtagtgcaggaattaatgcaagattaatatttattactaacaacgcattaaattatataaataatgaatcaaagaaaacaatagagaaatttaaacctttcttaacctttttattagaaaagtataatcttacaataagctctacactagacaagctgacaggtgtttataatagaaaatattttgaagaagcgttactttttttattagattctgcgaaggcaagagaaagtgaatttgctgtaatgatgtttgatatcgacgattttaaaggcgtaaatgacaagtatggacatcaaactggagatgaagtattagttaaggttgcagatgaagttaaaaagtgtatgagcaaaggtgatattattggaagatatggaggagaggaatttataattctcttgcctaatgttaattgtgaagcagctataaatttaggggagagaataagaaaaaatatagaggaagcaaggattctaggagataaaagaaaagtgactgtaagtataggaatagcaatgagttcttatgaatctcttaacaatgaagaaattataaggagagctgaccaggctctatataaggctaaacgtgatggaaaaaatagatgcatcgtttgggaaaatgagtgcggagcaagtggaaatacaaatgacgaattaactggagtattatcaggaaatgcggctaaagattataattttatgttaatgctcaaagaaatagctggtattgccaaacgtagatgtagtaaggaagaaaagatttataatcttattttaaagattatgcagacgattgagtgcgatgtagctacaatttttattgtaaaagagaagaaaatagttaatacgtatagtaagagaagaaataaggataattggaatttagatgataggtttaattttaaattagtaaatcaagtcattgaagaagaaaaaggtttgtatttagtagattgggagagcatggacagtcacaatagttatgggcttcctgactggaaatcagtctgtatagctccaataatttgtaacggagagctattagcagttatatacctttcaatttcagtaaatgagaaagaatttatttgtaatgactataatgtgctgaattttttaatagaaataggtagttccatttttcttggttaaactaacaatacattttagaatgttttcaattcataatcacataaaagtttatttatcatattatataaagagaaccaatttttaagaggagctttttatgagtgatactgttcctagaaattatgaaaaagaaaatattaatgatatagtatctgtagaaaataataccaattataaatttgaaatatccgatgataataaggagaaaagagataataaagagttcatattaaatgagaaatctgcaagtccccaaagagtagaagaaaaagattgtaatggaggggaaattattgttacatcaattttggaatgtgaagaacacgaatatttaaaaggtgtaaaaattaatttatataaaataaatggattatctcctgttcttgttaaatcgaaagttacagatgaggaaggaaaagttattttttctggagttgaggaaggctgttataggataattgagattattgataaaagatactttgaaaaacctaagtatataaattggaacgaaataataatagacaatactaataagaaacaaaaaatagtagtagttaataaatttaaaaaatttatggcacaaaacaaatataagaattaaataaagaattaaggttatatttaaaaaataaattaatttattcgtaaatataaccttttgcatatgtttaattaagtaataaaaattatagaatactttaatttaaataaaagaagtggatttttgtattggaaaattatataatcataatattatataatctttaagtaggtgttagaatggataattatattttaaaaataaaaaaaatcgatgataaagctgtgatacctaattatgctcatgaaggtgatgctggattagacctatatgcagttaaagaattaactttaaagccgggagaaagaggattagtacatacaggaatacaaattgaactccctaaaaatactgaagctcaaataagaccaagaagcggtcttgcattaaaaaatggtataactacgttaaattctccaggtactatagatgaagggtacagaggagaaataggagttattctaattaatcatggaagcgaagttttcaaagtggaaccaggaatgaaaatagctcaaatggttataaaacctgtagttaaagttgacataatagaaatagaagaactatctgaaagtgaaagaaatcagaatggatttggttcatcaggaacaaggtaaatggacaggtattgagagatacctgtctttacttatcaattaaactaattttagagatacattgaacctgcatggattataatatccatcagttattttccagtctttaaagtcatttttatcataaagtaagtgctcttttctgtgtgaagtcataggtaggtctccaataaatatagcctccttagcaactcttttcaattctgaaattgcttgtttagcatactcttgattaggaaaatagtgaaatgctccaaagcaaaatactttatcaaaagttttatctttaaagattagattatttgcttctccgtgaagaactgaattgctaagtaattctatgtgcctttttacaagagaagaggaataatctactcctacgtattcaccacattttatatattgagctagtccacctgctccgcaggcaacttctaatattctatctgtttccttaatgtctaattctttaacaatttgtttagctatttcttttacatcagcagtagtatcttcatatccgtctaattcctctaaacatgtagtatttccatttccttttctttcccaaacttctttccaataagacatatcttccataattctctcctcctgaaatttattaaattgaataaaaataagaaatgttttattcatataaatgagttcaattattgaacagtattatactaacattgttcaatgttcagtacaataagttcatgcagaatttaccatagtatttcaaaatgagaagaggtaatagaaaagtatgtagtaagaatacagtgctgagactgaagtgaaaatattcctatgaataaaagatatatatacaattcattaaattaaaatagatatatatataattataaattaatttgaatatatatttaatcatatttaaattttaaatgtagaaaaataccgatttttgcattagtatataaaattatacttaagactaaattaatatttataatatattaaagaaaaagcatcctattaatagttacttattaaggcactttttttataataatcatctaattaatgttggaaaaatatttttacaaattatgcttattaacgacttggagatgaataaatatatgttgaaaattagcaaataagggactataatatatttaacatatagaaaaatatataaaaagagagataaatatggtaaagagtatttcaaaaaaaattataaatagtatatctacaaatgataactatagtaaagaccaactagaacaaatggaatatattctagttagtattttatttgagacgataaagctattttctgttatagttatattttcattgtttggatatttcgacaaaattattataattttagcagtcatgagtatgactaagatttttataggcggataccatgaagatactcaggttaagtgttttatagccacagtgctattagcaattggaatattggtgttaaattctcagtgcactctctcatttgtaggtaactgtatactaattatcttaagtatattttgcctatggcatcaagttccaataataaatcctaaaatgccaattacgcgccaagaattaataaataaaaacagaataagaggtctaagtattgcaacaatacttggtataacatctatatgtctgtacaattttagcaactattattcgcttataacatggacaatcctatttaacaccatattaatgtttaataaaaaagatgcttaatgttttgaaatattaatgataaattttaagcaaaattgaaaggggaatggattttatgaaaattaaaaatttattaggtaaggtattaatgatgttatcactttcaatgattatatttgctccagcatcagcagctacagcaggaattgaagaaatgcctgaatctatgaaaaaattgagataagtcactttcacgtaaatttaaggaggaatttttggtgcgtttattggcagatataatagtctctatgattcaagctataattttcgcgtattcaacagaatgctgcttgaagagtgaaaataaattaaacaaacttaaagtagttttaataaccatagttacttttattataaacagtagctttacaagtatatttggaaacatatctatctgtgtgtttataatacatatatcatgtttagttgtaatgattttctcatataaagataacaaactaaagtcaatgattccctatacattgacatattcttttatgggggtatatggaattatatcatataatttattttttggttttatagaaggtatgataccagtagaatatgcagatatagctaatattttgattatatatgttccttatattttattcttatacttatgtataaaatacatgggcaagtttatagaaatgtacaagctagcagttagtgaaaagattaatatgatcgtgattataacaataagcttctgtctagatttcgttttggccttttatttaataatctataatgatgaatctaaaatgttaaaaaatatgataatcacaatcttgtgcgtatttttagcgtttatcataaaatattttgcaaatataaagaagaaatcagatcaaatatttaaattaaatgaagctctagaagaaaaaaatagcgaacttagaaagattaagcatgactacggagcacagatatcatatttatatggactttgtctaatggaaagattcgatgatttaaaaaaatctctaaaagatattataaataagaatgactctacgccaacagctgtagaagttagcgagaatagaaattctatattatcccttgcattaaaaccggctattgatatgggaatacatgtaataatagaagaaaattgtgatttctctttagtgagtattactgaaatggagttttatagaataatatctaatatagtaaataatgcaataaaagcaatgaacggcaaaggtataataattgcaaaggcttatgaatatttaggaaatgtaatagtaagaatagagaataatggccctagaattccagaacaacatctgaatgatatatttaaagttgggtttactacaaaggaaaatagtgatcaaagtcatggatacgggttaagtattgtaaaggatttagtagagagtcataatggtaagatatatgtgaaaagtagcgatgtagttactgaatttaaaatagtatttcctataaagaattttgtataatatttagtatacttaactaatggctatacttagtttagaataatctcaccaattaaataatcgaaagttagagtatgctattgtttatatacaagacaataacatactttttttatttaatatatgagctaatatcatatattaaatattaactaaattaggactatttttggaaaaaatataagatgaaggatttttagtggtgaaaatattgaatattgtaataaaaaggattattatataaatatatacttaacttgaaaataatatgagagtgatattaatatggtagatagtatttcgaaaaaaattataaatagtatatcaactaatgagaaatataacgaagataaacttgagcagatggaatatgtattaaaagttcttctaaatgaattaataaaaacaatattagtgataacaattttttcagcatttggatattttaaagaaataattattattgatttgactatgtgtgttattaagcctttcattggagggtatcatgaaaatacacagattaaatgttttgtagctacactcatattggaaattgggatcttgattttaagtttacaatgtaatattggttttataagtaattgtatcttaatttctttaagtatattctgcatatggaatcaagctccaataatcaattctaaaatgccaatttcgcgtcctcaattactaatgaacaataggattagaggtttaagcacttcaatatttttaggagcattgtctgtggttttgtataattacagtatttattattctttaataacatggacaattttatttcaagctatactaatgtttaataagagagaaagttaaaaattgggcactatattaaaagtaataagcaaagggagatgtttttatgattaaaaaattaataggtttgttgttagaaaaaatgtcaaattcaatggttacgttagctccagcatcatttgccagatttggtgttgaagatatgcctgaatcaatgaaaaaattgagataacttaattttttagaaaaaagaggatgcgaataggaattgatttcatgtacatagcgacttttgtattataatgattagtagtggctttgaaatatgcattatagattgtcttatgaaaataataatgttttgagttgttagtttttatgtacctaatataagtttgataaaattataaaaagttatggtagaagattttgatcatcaaccataacttttttattgatggaaatttttaaaatatataaaaactattttaaaaattcagaataatagtgtaaactatatattaagtgataaaacttaacataattaaaaggggtgcgatggcatgtataaaatagtgaacaaaaaggagctaacaaataatatattttcaatggatatagaagctccaagagtagcaaaatctgcaaagcctggacaatttattatcataaaaaatgatgaaaaaggtgaaagaattcctttaactatagcagattatgatcaggaaaaaggaacagtaactatagtttttcaaactgtaggaaaaggaacaaaacagttagctgcttttaatgaaggggatcatgtagctgactttgttggaccattaggtgtaccaagtgaatttatacatgaggatatagaagaattaaagaaaaagaatttcatctttgtggcaggtggagttggtgcagcaccagtttacccacaagtaaaatggatgcatgaacatggaatagctgtagatgttattttaggaagcagaaacaaagatttattaatatatgaagataaattaaagaatgctgctggaaatctttatgtaacaactgatgatggttcatatgaatttaagggaactggatcagatatgcttaaagaattagttaataatcaaggtaaaagttacgatcatgcaattattattggaccaatgataatgatgaaatttacttctatgctaactaaggaattaggaatacaaacaacagtaagcttaaatccaataatggttgatggtacaggtatgtgtggtgcttgtagagttaccgttggaggagaagttaagtttgcttgtgttgacggaccagaatttgatggacatttagtaaattacgatgaatcaatgagaagacaagctatgtataaaacagaagaaggaaaagcacagttagaagttgaagaaggaaatactcatagtcacggtggctgtggttgcagaggtgataaataatggacatgaatgagagattagttagaataccagtaagagagcaagatccaaaggttagagcagcgaactttgaagaagtttgtcttggatataacgaagaagaagcaactaaagaagcttctagatgtttaaactgtaagaatcctaagtgtgtagaaggatgtccagtatcaatcaatataccaggattcatttcttatgttaaagatgaaaaatttgaagaagcagcaaaagaaatttcaaaatacagctcacttccagcagtttgtggaagagtatgtccacaagaaaggcaatgtgaaggaagatgtgttttaggaataaagggtgactcagtatctattggtaaacttgaaagatttacagcagactgggcagcatcacataatgttgatttaagtgcaacagaacctaaaaatggaattaaagttgcagttataggaagtggtcctgcaggacttacttgtgctggagatttagctaaaaaaggatatgaagtaactatatttgaggcacttcataaagcaggcggagttttagaatatggaattccagaattcagacttccaaaagaaaaagtagttaaaaatgaagttgaaaacattaagaaacttggtgttaaaatagaaactaatgttatagttggcagaactataactatagatcaattatttgaagatgaaggatttaaagctgtatttataggttcaggtgcagggcttccaagattcatgggaataccaggagaaaatgcaaatggagtatgctcagcaaatgaatttttaacaagagtaaacttaatgaaagcagcagtagaaggatacgacactccagttagatctggtaaaaaagttgcagtagtaggcggaggaaatgttgctatggacgcagcaagaactgccttaagacttggatctgaaagccatatcgtttatagaagaggtgaatcagaacttccagcaagagtagaagaagtacatcatgctaaggaagaaggagtaatctttgacgtattaactaatccaacagaaatcttagtagatgaaaatggatgggttaaaggaatgaaatgtgtaagaatggaacttggagaaccagatgcatcaggaagaagaagtccagttgaagttcctggttcagaatttgttatggatgtagacactgtaataatgtcacttggaacatcaccaaatccattaatttcatcaacaactcaagggttagaaattaataagagaagatgtatcgtagctgaagaagaaacaggtcttactactaaagaagcagtttatgctggtggagatgcagttacaggagcagcaacagtaatacttgctatgggtgctggtaagaaggcagcaaaagcaatagatgagtatttacaagaaaaataagatctttattagatttcagtaaacaataagatatatacttaagctaatattttatataaaataagaggatatttgttccaagggttaaaaataaaagccattagaaccaatatccttttttatactcaaatgtaaattaaattgttttatatacaatgaattaatatggtggaaaatgaatgaaaatgaatttttcttttgacaaaatggatggtagatagtaaaatggttttatgtttgtacatgtgcatattatttaagattatatatagaaaattatataataaaaagtgatacataattatatctattttatgtttattcagtttatatgtagcaataaattataataaaaaaggaagaaataatatgaataaagcaatgaacttattaaaaagaattattttattttttgttggaatgagtataattcagtttggtgtagcattatttttgaagactaatattggctctgatccatttactgtatttacgcaaggtttagcgtttgcattagataaaacaggattaaagaatgtttctgtagttaagttgataagtggagcagatcaagtaacaccaggggtagcaaatatgattatattgattgtactatttgctgttatactcttagttgagagatcgcgtataaagataggaactttaatttgtgttgtaggagtaggaccaattatagatcttggagtgaaggttgtttcatatttcccagttgaatcttataactattttataaaggcattattggttgtatttggatgtttaataattgcaatagggtttgcagttttatcagcaacaaacgtaggagttgccccaaatgatattgttccatttataatacaagataagactaaggtacaataccgttggattagaataacactagatgctggatttttaataataggatttatattaggaggaaaagttggtcttggtactgtgatagcaatgataacaactggaccatttatacaattctgcctcccttatggagaaaagtttgtaaacttattagtaaatgaaaaagatgtagatgtagaagaaagtgttacagctactgcatagttaatttataaaaataagaataaagctatgatattatttattgattagtttagtctaaaagaatagaaatttaataaaaaacagaggtttttaagcaacctctgttttttattatatattaatcaagttgaaggattggtataacataattatgaattagaattattgagatatagaatagttatagttagctgagctattgctatcccaagatcctgaatcatttttaaatgccatatttaaagaataagtagcagatggaatagttatagttgctgcccatctaccatcagattgtttagtcattgtaacatcagttgggtttgtaaaatcattatatccccaatgtaaaattactgaagttgaatttgctgctaagtttccattgtagtatatagtggttgttttactagctgttggcgctggattaacttgtactggcacagatgatgaagaaacttgtaagtgccaatctttgctggagttattatcccagttagatccgttagtaaaatcgaaatctagttttgtagctgatgaaggaatttttatagttgctgcccagaatccatctgaacctttagtcattgtaacatctgatggatttaagaagccattatatccccagtggagtttaactgaactagaatttgctaaagaaccactatagtataaagtaaaactgttaccttgtagtaaagtgctgctatcataatccactttataacctgaatgaggagcataagtagaaggtacaggaggagtaagtattgaaccatcattgtagagaacaattaccgaattagcaggaatatttcctgaaattgttccgtttgaaactgttaaagtacaattagcactacctttattagtataagtgccatttgctaaattagtaggagagttaatagaagtacttccaccatcgtttactattacagtaccatctgttcctctatctattaacatggttgtattattgtttgtccacctaatatattcattttttcctaccattgcattatggaagttattaattgctactatgtcagcatccttccaaagatcatcacccttggatccaatattgccagtaggtctgtcaaagaataaaggtgtagcgtttgcacgagcagcagctatagcccagccaagttttctttgagtatctgttaaatttttgcttgatccatcttcataagtatcatgggtttcaacaaaatcgactgccttagatgagtcaacgccacccaaggtagtgccaagtgaacttaaatttgttgaggtaactgcacttcttaccgctccgccataattacttgcagtaacattcataaatgattcgtaagaggcaatattatctactgaaccgtcttgtagaatttcgccataaataaataaattagatttattatgcagattacctagaacattactccagtagtttccagaccaagattgattagagtctagtccaatattagtttcgatatgtttagctgcgtcaaaacggaatccgtcagcaccagcatctatacattgatttagaaatgttattgctttgttttggacggtggaattttgagtatttaaatctggcatgcctatacctttttgcgtcacatcatatctattagtccaattgctacattgtccttggttatgatataaattagggtctttgaagctaggatctatactggaatctagttgatctggatttccattgttagccatatgattcattactacatctacaacaattgaaattccatatttatcagcctcagtacaaagtgccttaaaatcatcgtagtttccaagttgagcattacctacagattgattggttggttgatataataaccaccattgacttggatctttacttgaactttttgttccttgtacaggagaaacctgaactgatttatatcctgctgccgctatgtttggtagttcattctttatagttgcaaaagaccagtcaaaggcatgaagaatagctccatctttagcattagatgggaggctagtactactagcggcataagctgtagttaaaattccgtttgttccaaagcttggtattgaaattggaagtaagtttaaacttaaaaataaacctgaagcaattaatcttgatattattttttttctcattgatacacactccttaacatagcgcaatcggttgcaaaaaatacagcaatagtatatttatttgtttatacatgcaaagtagtaattattttccccctctctattaagtattagtcacgaataaaataatgcgtaactagagtttatattttgcatatattgcaatcggttgcacaaaacttaaaaatttttatctttgaagatattaaactgaataaattttcgtattaatctcataatgattattttggattaatatgaaatttatgtaaacattatatcatatatgttttaaaattcaatagggcaatttaattatagaaattacctaatatagcatattaattctaacattacatattggtttttctataccattatcctttaagtttgttatttgaatttaattaattatatattaacaagttgaatacagcatcttaatcactaaacaatggagtaagaaatgtagtaattatatagcgaatattgaaatatattttgaaatggtgtaaaattattacaaataatgaaataagtcgataaaaaatgactagagtttataatggaaaataactatgtatttataattgcaggattattttatttaaattaatttctgtacgaaaaattggggatatattattaaaaaaaggaagtgttataatgaaaattcttattaatttaagtgttaagaagaaacttgtttcagtgttctttgtgatttgtatttttatagccgcaataggaacagaaggaatattaagctctgcaaaaataaatgataatgcagatgtcttgtatagaaataatttaatatctattaaagacttaggagaaataaagggaaatatccatgacatgagagctacatataatagattagttttcgaaagagataaaacaaaactagatgattatctaaaggttataaatgatttagacataaaaaatgacaagagtatgaaagaatatgaaaatttaattacagtgtcagacgaaaaacaaacttataataatttgaaaaatgatttagcaaaatatatagaagtaagaaataaagcaatcgaattcgcgaaaaccggggattatgatgaagcaattaaaattagcaattccgatttaaccacaattaaaaattctttacttgaaaacattcaaaaaaatattgatgcaaatgcaaaggctgcggagcaagctaatttaaataatatatctcaatttaagagtgttcgatatactatattaatttttacaacaggagcatttttaataattctttttatggcatatatgttaagcaagaatatattgaatccattaagagagataaaggactttgcaaaaagattatcaacctatgatttcgctaatgcgattacgattacaaggggagatgagtttggacaaacaggcgtagctttaaacactgcgcaagaaaatgtaagtagactggttaaagtaattatggaaaactcgcaggatttaagtgcaagctcagaagaactttcagcaacagttgaagaaatatcttcaaaggccaacaccatagatcaagcagtagataatattgcctctgcaatgcaagaatctagcgcgactactgaggaaataagtgcatctattgaagaagtagattcaagcgttaatgtactttcttctaaggccatggagggaagcaataatgcaagtcagtctaagaaaaaatctatggaagttaaaaataatagtcaaaaagctattaatgaaactaggaaattatacattgaaaagcaagaaaaaatgcaaaaagccatagaagatggaaaagtagtagagagtataaaagttatggcagaaacaattggaggcatagcagaacaaacaaatttacttgcattaaatgcggcaattgaagctgcaagagctggagaacaaggaaaaggatttgctgtagtagcagaagaggtaagaaaacttgcagagcaatcatctgatgcagtaataaatattcaagacacaattaataaagttcaattagcatttaatagtagcatcaacacaggtagtgatatattggagtttataagcaaaaatgtagaagaacaatttaatgattatagtgaagtaggtaacaagtactataatgattcaaactttgtaagtaacatgtcagaagaaattgctgctatgtcagaagaaataacagctacagttggacaagttagtgaagcaattcaaaatatggcacaaacatcgcaaaaatcaagtgaaggagctgaaatgataaaagatagtatgaatgaaacaacaaaagctattgaacaagtagcgttaacagctcaaagtcaagcagagcttgctcaaaaacttaatgaaatggtacaaaaatttaagatatagtaatacttattaactttaagaagatatagactttaggagttaaatgaaaaatacaaactaatgatatgattagttataaaataaaactaggacaatagaaggtgaatcatataaaacataaagtgatattgaaaataaattatcactttatgtttttttgattaaaagaagttcacatgaaaatatattgtgaaaattattttttgaagatgttatatttcatacaatatagcatattaaaaaaaccaatggatatgatgtaatatgttgaaagcagatgaaataagtgtaataatgtaatggggatattttatctttaattgattggaaaaattagttaatattaatgaaaaatgataagataagtaggatttttagttaatcatgaaaaaatactttaactatgtaaaagagggggagttaatatgtcagtaacaaaaggatcagtgatattttatggactagatggtcttgataagaaggttaatgatatcattgaggttttggatttgaaaaaacaatcttttgaagtgaaacttataatatttgaagccgttaataatgcgtatattcatggaaatagtagtgatagcagtaaaccaatttatgttgattgggaattgaaagataatttactaagtgttatagtaaaagattgtgggcaaggatttgagaatataaatttgcataagaaaatagacgaagagaatatattagatgaatcaggtagaggcttgtatattataagttgttatactgatgaactaatcttagacggaagttctataattatgcgtaagagtcttttatgtgacatatagattgatatatggttagtaattgatacctaatgaatattgtacatgctagggaggcaattagatgaaaatttctttaaagataaaacttatgattactttttttatactcatttctttaccaatggggttacttgggtatatttcgtatagaatgtccagcgcatctatacaaacggctgttcaacaacaattaaaggaacagacttacaatacatctaatttaataaataaaacgatagattcaacaaaacattctttggaagttgcaagtttgaatggcgatattataaaagcagttgaaaattcaaatacaagcaatctagatacagcttctgaatatataagagcggtccaagagaaaaataaagattttatggaagtattaattattacagatgcttatggtaaggtaattgtaaatactcagtcaaaagagaatgatatagatttaagtgatagagattatatgaaacaagtacttagtagcggtaaggaagttgttagtgaagtattaacttctagatttactggtaatccagctatttttatagcttatccattgaaggaaaatggtaaattgattggtacacttgtaggaagtataaagtttgatagtatatcaagttatgcatctcaaataaaagttggtaaaagtggatatgcatatatgattgataaaactgggttaattgtttatcatccagattcaagtaaaatcctaaaagaaaatgcaaatgataatgcaggagaagatttaaaagttttagttcaggaaatgaaagaaggaaaatcttcagaaggcttctatacatatgggaatatatataaatatgttgttttccaacctgttggtaattgggtgattgcagtcacagcgcaatatgacgaatatatgtcagcagctttaagtataaggaactatacaataattatttctttaatatcaatcattatagcaatgatatgtgcttatacatattcaacaataggaataattaatccaattaagaaactagagagattaatgagatctgcaggagaaggagatttaactgttaagattgatatacaaagcaaagatgaaattgaggaacttggaaaatcattcaatgaaatgataaagcatcaagatcaaatagtaagaaatgtaactaacgcagcagaacagttgaatgcagcatcagaagaaatggcagcttcttcagaagaaataagtgctgcaactgaagaaataagtgctacagttaatcaagtggcgcaagatgcagaaaaacaaaatgaatctatagttgatgtttcaaaagtgttggttcagctttcaagtcttgttcaattagctcaaagtagagctaaagctacaagttcaaatgcagctaatacaatgtcagcagctgatcttggaagagaaaaagttgaggaaactgtaaaggcaatggatattataagtaaaggcagtgaagaaacttcgcaggcattagaatctttaagtggattatcgagtaaagtaaatggtattataaacataataaattctattgcagagcagactaatcttttagcattgaatgcagctatagaggctgctagagcaggggagcatggaaagggatttagtgtagttgcagatgaggttcgtaaattatctgaagaatcaaatgatagggcaagagagattgctgtactagttagtgaaatggtaaagcaaacacagaatgcggtaatagcaatggaaagatctaagtcggaagtaaacaatggagtaaaaatagtatcagaaacagataaagcatttgtagatatcattaatgcaatagaaaatatagttaaacatgtcactgagatacttgatattactggtgatgaagtagcatcgtctgataaggtaattgggcttataaatgatatagcaacagtaacagaaagcaatgcgtcaaatagtgaaaatgtatcttcggcagcagaagaacaagctagtgcaattaataatttaacagctacagcacaggaaacaagcgctatggcagaagaattaactaagcttgtagaaagatttaaaatatgaggtgataattgatggaaataagtataccaaaagactttgttgttgatgaagtcgcaaattttagagtaaaagtaaataaattaatagatgaaggacaaaagaattttatattcaattttaatgattgtaattttatagatagtacaggacttggcgcattagtagctgtttataaaaaatgcgctgaaaagaatggaagtataaaattaaaaggactaaagccagaagttgagaagttatttaaattaacaaggttagataaggtatttgaaatttgtccgtaaaaatatctggagtttttatgaagtgaaattcagatagaaaggactttcgattgtatgcgtgagggtaaagaaagtataaaaacattagatgaaagcgtagaaataagtcaaagtaattacaaagaaatttgggacaaggtaaatgagttagtgtttgtaattgagattagcaaaggatttgttccaaagaattttatagattttaataataaagtttgtagtaaattgggttattctagagaggaacttattaaaattttaccttcaaatgttttgaatttaaccaatatagaagataagattagtatatttgaaaatttaagtaataagagagtatgcgataaaatagagcttacattaaaatcaaaggatgaaaaacgtatttacgctaaatctaatatatctctatttagtcatgaagaaaaagattttgctttagtaattgcaactgatattactgaatacaagatattagaagaagagcttaaaggaatattaaatggaatacctgatgtaataaaagtatacaatacagattataccatatctttttttaatgaagcagggtatgagttttataataaaacttcagaagaaataaagggaaaaatgtgttatgaggtgctatctagaaatgaaaaatgcttagattgttcttttgaagaagtagtggcgactaagaaaatgctatcgcgtgaaagatatattccagaattaaataaatttatggatgtatgctataatccggtgttagataaaaatggagaattattatttattgttgagaggcttagagacataacagagaaaaaaatgcttgataacataactaaagatagcagggaacgatataaacaaataattgataattcacccgatgctgtaattattatagtagataataaaattgctttagctaataatgaagcctgtaatttgtttgcaacgctttatgatgatttgattgggagtaatgtatatagacattttgaagacaaatataaaaaggctttgcataaagtatttagaaatataatatctgaacgaaaaatgaaagaaatttatgattatgacttctacgttccaaataataagttaataaatgttcaagtttcatatagctacatattatacgaaggtaaccaagccatattggcagcaataagagatattactgaaatgaagcgagatataaagaaagctgctgagttacaaaggagtacgcttcaaaaagaatttcctgctcaaaaatttattgatactatgagtgtgtatatgccagcccatacaattagtggggatttctatagaatttatgaaataaacgaagactttattattggaatgataattgatgttagaggtaagggaatatcggcagctctaaatatttctgcatttgatattttgtgttttcaagaagttaataagggtcaccatgatccaatggagatagtaaaaaatttaaataagaagttagtaaaatattacgaagaaaattatgttgctgtatgttgttttagcatggattttaatagtaatgagcttagagtagttggagccggaattaatcaatttctttttcaaaaaaaaggagaaagtttagaagagaagattgtagaaggatctttcctaggtatgtttgataatagtgaattctgtgagcaaacgatcttttttgaatcaggagataaaattttcttttttactgatggattagactttattctagaagaggataaagttatacaggaatatatgagggattcaagcatatttgaatttaagaattacttagatgatttcttaagtgatagtattttagagagtggaaaattaaaagatgattgtacaatggttgcaatagaaataaagtaaattaagatttattgatttatatcaaaggataaaatttataataaatattatcctttgattattaatttaaaacttaaaatttgtaaaattttttaataaaagtatttaatgattttaagttataatacaggatttattgattgttgattctaactaagtaacaatgtaccagttgacacttagcatctattaagttagaataggttatacaagatgaacatttctttgaaaacaaaatatgttattaaaccatctttaacttgggggcgttttggcttcgacgggggtaagaagggtttgttaagcgagtcgagggacgcatggagcctcgttaaaaaagtatgcactaaatgtaaacgcagaagataattttgcattagcagcttagtttaatagctgttcatcagcccaggttgcctacggcttggatcactggtgtcattaaagtgggaaacgaagcctagcaaagctttgagctagaggggtattcatgaagctactgagaagtatagcctgtctaagggcgatactttgagggaattttaaaacttagactgcactcggagaaagataaatcaatctactttcggacacgggttcgacacccgtcgcctccaccataaaatccacgaccatttgtatgtggcttaaatagctacttacaggtggtcgtgtttttttattgtcatgggtagcataataattaaaccatcgaaaatttttaaatatacaatatgtatgctaattttaagtaaatagttaactaggaggtactcaatgggaataagcacaaaattaataggaaaacaaatacttgaagcaatattaagtgagagtaattgtaaatttgggtcaaccaagataaaaaatattgattatttaataaatgaaaatataggtataaaagttgtagtaagaaatagagaaacgcagaaaataaaagatgatactatttatgaaaaaatatcatctataaatggttttgacaatgcatgtaaagagaatgatttattgccatattattgcattgcccagatactggagaataatataaacgttcttctatttagtttacaaaaagcaagagaagagattactaatagtggattaaatataaatataaaagaaagttcaattaaaaataatgaatgtatatttgatggggttttgtggagattgcttagaaaagaagaaatatttattaacgataaattcattaaaggtaatgcagagttaatatatgttggagaagatgttgcactatataaaaaacttttttatatagatgaaattgctgaaactattgaagataacccagaagtagaaaaagaagataacttagatgatatggatataaatagtttaaaagatttaggtactactgaaaaagaacaactagttaaatcaagaattggacagggtaagttaaaagaattattaataaagaaagattgtaaatgtaaaatttgtggtttgaatgatgaaagatttttgatagccagtcatatacagagatgggcagaatctaatgataatgagagaagagatactaacaatgcatttcttctttgctcagaccacgattggctatttgataagttttatataagttttgatgatgctggtaatatttcactaaatgatagtttagataaggtgatttatgaaaatttaaaaataagcaaggatttaaataatataagtcttaatagtgagaataaaaaatatatgaaatggcacagaaaagaattttataagaaaaacaacatataataatttaattgtaaaaaatgtatatattttataagtgtcattgaaaaaaagacaagctctaagctttgtgataataaggaaatacgtaaggagtacattgaagaatatgtattgcttgaattagaaagaaaaatatttaatgataaagcaatcacttatatagcagaaggtattaataagaaccttcaaaagcaaaataaagctgatgacgaaaagaaggtagtgttattaaaacaaatagatgaagttgaaggtcaaattagtaatatagtaactgctataacaaatggatttgttcaagaagagttcaaggctaaaatggatgaacttaagaatagcaagagtgaattagaagctaagttatcagaaattgaagctaaagatattaatcaaatagtaacagaagcagatgtaagaagattgttaagtaattttagcggctatgtaattagtaggaatgttcctgagtgcaaaaagttcataagagactttgtaaaagaagtcattgtttataaagaacacattgaagttatcttcaatgtgtcttttgctttgatcaaaaatagttaaggagttaaggttatgagcaaaattagcaggtatgatttgtatgaaatatatagtctgagcttttatatagaggttagttaacgttattatgaggagccgtatgcgggaaagccgcatgtacggattctgtgaggggctacattgtgaggtgtgagagtgtaaaatagtctgtgtaaacttcattagaatgatataataaattatcaaatgaagggagcacaggctatgtctttatctagagatgaattagtaaaattaattttgagtaactctgatataaaaacgactgaagatatacaaaatacattaaaggatttatttggaggggtacttcagcaaatgctggaatcggagatggaaagtcacttaggatatgctaaacatgattatgaaaataaaaacacttcaaatagtagaaatggaaaaagtacaaagactatgaaatcaaatttaggactatttgatttagatgttccaagagaccgcgaaggctcatttgagccggcgatagttaagaaacatcaaactgatgtatcacacctagaaagtgctgtgattggaatgtatgcaaaaggaatgaccacaagagatatagcaactcaaattaatgatatttatggaatggatgcatcaccaacgcttatttctaatataacagataaagttattccaatgcttaaagagtggcaaagcaggccattagaatcaatttatccaataatatttatggatgcaatccattttaaagtaagaaaagataatgctattgtgtcgaaagcagcgtatgctgttatcggagttaaccttgaaggtaagaaagatgtattgggtatttggattggtgcttctgaatcaccaaaatactggttattagttttaaatgaacttaaaaaccgtggtataaatgatattctaatagcatgtgttgatggtctcaacggttttaaagaagctattaaagcagtatttcctaatactgaaatacaaagatgtattattcatcaaataagaaattctagtaaatatttatcttataaggatttaaaagcctttaatactgatttgaaatcagtatataaagctccaacagaagacgtcgcgttagcagaattagataatttagaagaaaaatggggaggcaaatatctaatagcaataaaaagttggagaaataattgggatgaactctcaacatttttcaaatacccacctgaaataagaaaaataatatatacaacaaatgcaatggagagttataaccgccaacttaggaaagttactaaaagtaaatcaattttccctaacgatgagtcattactaaagatactttatcttgcaactattgatataacaaagaaatggacgcaaggaattaagggctgggcgcaaattttagctcaattatcaatcttcttcgaaggtcgtttagacgaagttttgttttaaaaatgcaggaactcaactcactcaatctatacatacataatgtaataatattgaataaatataaaattaaggttagaagttttattctacctccaaccttataaaataaacatattactttttgaagtttacacgaaagtcttgacagactctgaggtgtaagtctactcgacttacttttattataagtgctgaatcatccattacataatcatccgcattaatttgtttacccaatggtttttatattcttaaaattatttatatggtatttcacctaaaaaaattagattttgctaacttttataggttcttttgagccaattagtttgcatttttcttttagttcttcttctaaaataggagaacaaacttttaaattatccactaccttttctttaaatgcatctggatgaaaaataatagagagagtatttttgttattttgttcaaaataagattttaatccttacgtaacaaaatttggttcctgcaaataaaagtgttttctattgtaattatcgaaacaattttcatctgcatcttccttttttaatgagtttctatatgctccctattcactgcgcaaaattctctttaattcagtcaaaagtaaaaagtaaaaacgtccatcatggcatgttaaatccggttttacagtttttacgttgactttcaagtgaatagcgttagctttaagcattacttcctccggcagagtttcttttaggtctttgcctaagaaagtaactcctatcctctttttgtctaatactttatttattttttcaattccgtcattaatatccgtacatttcattatagttagaattccaactgcaggcgaagctgtcaatatgtcaactaactcgtcatttgtttccaatagcaaaggattcattttgtgatttttgaagctgacattttcctgttcttgatcatatttgacgcctactaaaatattaatcagacccattttttctaagtcaataatgcggtttttcacagattctttagtatctctatcgcaaaaaccaatttgattaccttcataaagcggatttcctgtcttttcagccagattaaagaatttttcaattaatttttgtttaacttcttcatagcactcttcaacgatgtataaacttttaagagaacattcaaacggaaatgaaatacaagactctacaattatatctatagaacgttctatatctccaccattgcaaacaatagccgtatgattatggtaaggatggtttattattgttttaccataaaacaaatctttcaaaactacatcatcccctgtactctgattatttgttttctcatatcctatactgttgtcatcaccgaatgtccatacaacatcacttgcgttaattaacgcattattaagacttgatgcattttcattcatctgattaaaatcgataatattaaaacctgctgctggatatcctaattgttttaatatgtcagcaatcttaaatagaaaagaaactattatcttattggatttaactataatcggcatcccaagcaatatactgataggcaatatcatgcctattgcccgcaccgccaataaaggcagtggtacataaacgattccttgtttaggtgtaaatatactttggggatcaaagcgtgaataaatattattattctttacttcataatttacaaataattcatctatttgatctttaaaaaaacttacaagttcctgtgcttggttccttgaagaacttatgggaatccctgacattaaagtgatatgcttttcaaattcttcatctgacgaaattaacttaataaacttcatcaaaatctgcttcctattttcaacagacattgattgtaactcttccattgcattttgcgcttttgaaatagctattttaacatccataatatttgaatcagcacattgaattgaataatcaataaaaaattcactggtagctttgtatgtttttccgcttaaaagcatttcctttccacctattaaattgtaaaatatttttccatccataaatgatacctctctactttcaatataataattacataattcttatgaaagcccatcacattaaccacaaggcgttcctacttattactgtatgttgctaacccattgtacacatacatccacttgaaataagatcctgaggattgtctattcttgataaatttgatataatttttgatttaattccacaagagcattcaccctcatctgcgacaacagttgccttatctccgataaggtaacggatgtagatagtcccttcccttgcaattgttgtaatagctaccataccagtttcaccttttttgcattgtactaactttccattttcataacgcactatttcaacaatatgaggtccatacataagatgaaaattattatgtttacataaattgactccatttgaaggagtatttgtcgcaagaaccaatgcttcacaagctccatacgcatttacaagaggtttttcgaaagtattagcccatgcggttgcctcatcaatcaacttatagccacctaaaaaaagagttttaatatttttctcaagcacgtcctgaccagcttctactaaggacataaagtcaactcctgcgtcttttgattcttgtgctcctttcaatacatccccttgtactgttagtagtacgttaacattgtagtcctttatcacctttataatatcttctgcagtctcgttggttcttcttggaataaatgtaactccgttcaacataagtccttctttaattgcttcgccacccttatgtgtagggttataagtcgaaagagctacatctccaggtctaatcccttcatagtaaaaggatctagcaaatgagtgtgactctcgtataagatcattttttgtaataaatgtaggagttgcaactcccttagtccctccggacttatatatgtacattggatcttttatatcatttggtcttaagacgtaaggattttccctaactttgccacgaaatcctatattctcaatagtggaatcttttactaataaaggaatcttattattaaagtcatccatgttatttatactatctatatctatgtccttatatgcgttcttgtaaatttccatcgaattttttgcacgtttaagttggaactttataaaaggaaacaacatattcattacttcatcttcacttaacgtgtcccattcatgcaacccccaatatgacggcggtatttgaaatggtgttttataataaccatttaaacacttttctttaaactcccaaaaaacagaattattttccataaaaatctctccttcgttgctatgttagctaaaaattttaatactcatcttgtaatattagtactcataagcagtattttgataatgccagcatatatgcaaccaagaacaaaacaaaaaatgcaacataatactatgttaaatttaattttcttttgagaaaaaaactttgcctatggtatcacagatgctagtatcacatttggcttgtaataaatggtgatatagttataataatgttaacgtagttaatttattacaatggacaccataaaaaaactttgtattatttttttaattagtaacatttgtaattttaaatctactaaggttttatatcaataagcattttgctcaaaattagcactatattgtaatatctgtgttattttacaaaattttttacttttttatttttgtagccattcagctattaaataattttaatataagtggtatcattaatttctaaaaaacctttctattatcattagtttttggtattataaacacaacttgtataaactaatgataaggtaataactttcgtgagcgaaggcaaaatcattgaaatctataacaaaggaatatctgaggttataggtttgattaaagaattatccaatcaaataaaagaacaaagtgcaaatatagattaactttctaaggaaaataaaactttaaatgaacgtgtcaaatcgttagaaagtcaagttaataaaaatagtaataatagtatcaaaccgccattgtcagatggtttcaaaaagaaaactaaaagtttaagaactaaatctggtaaaactccaggtggtcagaaaggtcatgaaggtaaaactcttgagattagtgataatccagatgaaataatagtacatgcagtagataaatgtgatatttgtggcgagtccttacaggatatatctccggaaagacacattattcgccaagttgtggatataccagaggtaaaagttaaaattattgagcatagagcagaagtaaaaaaatgtccaaagtgtagaagaaaaaataccggtaaattccctgatggaataactaatagtgttcgatatggaggtaaggtaaaagctgtatcagtttatttaacacaatatcagatgattccatttaaatagggttgtaggtagcattcgtgtcatgaagtgcaaagtaacttcaataaactgtatataaattaaactcgttaacttaacgttatttctagaagctaaatataacagttttaagccattttataggtaacttttaagtaaataaaagtaaatattctatatcattctaatgatttgtttactaaattgtaatttctgaaataatcccatgaatggagcagataaaccagcaggattagcaatgtttgatttcaaatgacctagttgtctacctatagcatcaaatagtctcatacaattaaactattatatcttatatctactgcttgagtgataaatttaccagtgctatctattgttgtaatagtaccatttgaaatatttttgatacaaaaaatataaatactagaatagaatcatgtcaaagtgaatgtaatctgtgagttttaggataaaaactttctacatgttcgcgtaatcctcgtgaagaggaagcatcgtaaggaaccctattagattctttaaataattctatctctgatttaaggtattcaatttcagaataaatattttcttacataatataagtcattttcatgtatgattaaacgattatttacctaaatatctttagattactatttatagatatagtgctaaaattcagcaaattaattcttgaatgtattatttaaaatatttattatatatatataaacctagtgaaactgaactagattaagaagaataaactttaaatgaagtggccacccataagtatctaagcaaaataagagaaagatttgcatatcagttgtactagtgttttagatagctatcatatattacaaaaaaaggtggatttataatgaaagaacaaaaatttaataatcatccaaataataagtggattgtattatttgttgtagtagctatgacatttatggctactttagattcaagtatagttaatgttacactacccgtaatgtctaaaaatttagaagttcctctttcatctattgaatgggttattgcgagctattctattattatttgttcaactattttattctttggaagattaggtgatatgattggaaaaacaaaagtctttcaatgtggaagtgtcgtgttcactttaggctctcttttatgcggagtttcccattcgtttatttcacttattatatttagatttattcaaggaataggtggagctgcttatatggctaataaccacggcataataacagaaatatttccaagagaagagcgtggaaaagcattaggaattttaactactgctgttgccttaggaactatgattggaccaccagttggagggataattgcctcagctttaaattggcattatgtttttcttattaatattccaataggagttattgtttttattattgggattaaatatctgccaagaattaaaagggatagccaaaaattagatatagcaggagcagctcttcaatttttgggaatatcattgttttttggtgcctttatgctagctcaaaaaacaggttttgataataaatggataatggttgctttaattgtgtctataatcttaattgttttatttatatatattgagataaaaagcaaacatcctttacttgcattaaaaatatttaaaaacaaactattttcagtaaatttaatatgtgcttttatttcttttacatgtattgctgcatctactatattattgccattttacttccaatatactttggaagtatcgccatccaaaacaggatttcttttaatggtatcgcctattatacttgcaattttttctcctatatgtggtacactttctgataaaataggatcggagatattatgcttaataggtttaacacttatgagtatagcattttttcttttatcttttttgacagaatattcatttatattggaggcaacaatttttatggcattaatgtctttaggacaatccttattccagccagcaaataattcccttattatgtcaaattgcccgaaagagcagcttggtatagctggaagcgttaattccctagtaagaaacttggggcaaattgttggaatttctctgtcaactactattctatacctatttatgagccaaaaattacactatcaagttttaggatatgtatttggaaaggattatgccttcgtatatggaatgaaaaatgactatagaattttatcaatgatttgctgcattggcatagtattaaatattgttcgagtattcaaaaagaaaaagactgtagatactaaaactgaactgaactctgtcaaatagacagaagaaaaaaattatttcttatagcactagtgaaatacctagtgccatttttatgcaacatttttctttgaaaattcattatattttatcattactatggcttattacattatgaaacaatatgacgatctctaagatttaaaatagacttaaatatgtttttgtcgttgtttccatatttaaattatgtaatgtctgtaagtcattttgattataactttcagcattaaatccacaattaagtatgcttccagcaactgcttcaggagctgacttaatatagacaagtattttacggatttaatcttattttcaaatataactttagttttttaaacataaaaatatgctattcatcataataaacaggtttattatttttactccctgctaactctacgaggaatatttaacaattagttcgcagccttttttttgtaaacaaacatatcccaaactcaaacttttagtatataaatttagttggagaaacaccatatttttttttgaataaacgactgaagtagtttacatcgttaaagccacaatttattgcgacctctgttatattcatattactattttttaatagttcaattgatttttttaatctgacttcatttatatattctgttgtagtttttcctgtaatttgtttaaatatcctacaaaagtaataagggctcacatgagcaatattcgaaagatttaatgtggatatttttttattaaaattactatgtacaaactcaaatactttataaaaacgctcatcattattaattttaaaagctaattgtctttttgttacaaacttatctatataatttcggataagtaaaacaactaaattatataggttggcttttacagcaagttcatatccaatttcttttttattatactctttaattatagtctttatacaacgtacaatttcatcatcatttcttattaaatttttgaataaaataagattttccgacaatggagataagtattttgtctggcataaatcaacttgatcgctaaatagaaacggtagatcaatacgaattaagtaaaatcttaaatcattatttaaactttccaaataatgcaagtccctactgtttattattataacatctccttgaattatattaaaagattttgtgttacatcttaaaaagccttttccgtttataaagtaaaaaacttgtaaatgctcatgccaatgctctttaaagttagtgcctaattcccaaattttggacaatcctatatctacactaaaatttctatcaggcatatcttcgcaatagtaattttccttatttttcatatatatgctatcacttcttttctaatattattcttattgattaaatctaataatatacattgttttatattatcatgaatattcaatgattgttaaattatatcatatattgcaaaattgtactagttttacgcaacacagttcttgatataaaatcttcgtagatttaatataaaacaggattgtttgttgaaattttaaatagttttatatcaaatgttacaactagattatacaagataggaggaaatttatgagtgttttacatgttgagcatatgaatcacggctttggtgacagagctatattcgaagatgtttcttttagattattaaaaggagaacacgttggacttatcggggctaatggtgaaggtaaatccacgtttatgaatatagtcactgcaaagcttcagccagatgaaggtaaagtaacatggtcaaacaacgtaagagttgggtatatggatcagcatgttactcttactaaaggaaaaagtataagagcagttttaagaggagcatttaaatatctttttgattttgaagccgaaatgaactctttatatgaaaaaatgggtgactgcagcaaagatgaattaaacaagatgcttgaaagaactgttgtaattcaggattttcttgataacaatgatttttacgtaatagatccaaaagttgaagaagtagcaaaaggtcttgggcttttagatttagggcttgatagagatgtagatgatttatctggaggacaaagaactaaaattcttttaggaaagcttcttcttgaaaatccagatatccttcttcttgacgagcctactaactatcttgatgaagaaaatattgaatggttaaagaaatatttacagtcatatgaaaatgcattcatattaatttcacatgacatactattcttaaattcggtagtaaatttaatatatcatgttgaagaaagaaaactaacaaggtatgttgggaactacgatgaatttcagagaatttattctgaaaacaaaaagaaacttgaagctgcatatgaaaggcagcagaaggaaatcgcaagacttgaagattttgttgcaagaactaaagccaatcttgcaacttctaacatggcaagatcaagacaaaagagattagataaaatggaaaagattgaattaatccctgaaaaaccaaagcctaaattcaatttcaagcctgcaagagcttcaggtaaagttatctttgaaactaaagatttagtaataggatatacttctccccttacaaaaccactaaacatgtttatggaaagaggtcagaaaatagttttagttggagcaaatggtcttggtaagtcaacattattgaagagcttacttggaatagtaaaaccactaagtggtgaagtaaatcttggagattatcagcatataggatattttgagcaggaagacagagccgacaacagaaatacatgtattgaagaaatttggagtgaatttcctggatatactcagcatcaaataagatctgctcttgcaaaatgtggattaactgcaaaacaattagaatctcagataagagttttatcaggaggagaagctgcgaaggtcagattatgtaagatattaaataatgaaacaaacatactgattcttgatgagcctacaaaccaccttgatttagatgctaaaaatgagttgaaaagagcactaaaagaatataaaggaagcattcttttagtatcacacgaacttgaattttacagagatattgtgacagatatatggaattgtgaagattggacattaaaaatagtataacgatataaatttatgtcgttatagtgggcacatttttgttttttttaattgattttttcaaagattcttatattcttgagaagtcatgaatataattctattatgaattgtgtttattttatgccaatcttaaatatattgaatattgagatttttacgtattcaatatatatatgtaaacacttcctttttatcattactttattataatacttctaaaaaaactatcagtctatggctacacttttatactaacatcaatgtataaaaagttagcaatgtccatctttctattgaataacttatttcaagttatgttattttcttataaaatattcagttgtatttagatacaataacttttgagtgtattatgttttagtatgtggaatgaagaattactatacaacattatcaattatttgctgcgtctgtatagtattaaatattatttgaacgttcaaaaaggaaaaaatgtaaatgtagacggataaaaaataaaaatatagggagctgtcgcattaagaaatattactacaatatgttatattagaagcttaaaatcaaatactatatattgtggcttttattctttgtgcaacaccctcatgagaggatgatattaaatgagtaaaatttcagttaaaaattatatttctagtctatatcaaaattatactatcataaaaagagaagaatttataaaaaacacatctctagatttcttttgccctgtaatagatacatctgtagctatatttttaaggatattacttaaggccattagacccaaaaaagtattagaacttggaactagtattggatattcaactacaataatagcagaaactatcgctgaatggggaggcacagtaacaactattgaattagataaaaaagtagcattagcagcaaaggaaaatttcgaaaaatataatgtacttggtaatataactctaataaatgatagtgtattcgatgttttacctaaaatagaagaaaaatttgatttggtatttctcgacttatttaataatctttatccagatgttatggatagttgtattaattcactcgatcaaggaggtgttctaattgcagatgatacactttttcctgcacttgaaagaagggcatattttgtagatagtaataagaaagtggacgaatttaatagaagactaagcgagaaaagtaatgtggaaagtattcttcttccttttgatgatggaataacaattgctataaaaaaataatctcaataatttcataatatttattttataacttagtagttataattatagttagatttgatttatacatgcatcaaaatgccaatactcaaggcatttatggtacatgtataaattttttttataactctttattaaggatagctatttagaagttcttttcaaccggaattttcattagtcatcattttatggagtcgcttcttttaattcctctatattattttgtttcctcaattaaagcttttccacctaatttagttttcattttatttttatctttagagtttttttgtctaagtaaaaattgcactacttgatagtctatgtttttttcttttctgtaaactaaatggacatcagtctcatcataattatatttaatgagctcatagatctgatgtttatagtcttttttcttaatctttatagttcagtgtatatattttgggataaatttaacttcttcttcaaaatgaatcactgtctaatttttaatgcaatgaaactagttagaaaaaataaaaaaagtgaaaaaatttgtaaaataacacagataatacaatatagtgctaattttgagcaaaatgcttcttgatatagaaccttcatagatttaaaattacaaatgttactaattaaaaaaataactttacgtaagataggagttgaatggataaagaaaatttaaataaaataacggaggttataatgagtaaaaaagaaacaataaaattacttcttttaccttacgcaggtggatcgggattgttttatacgcattgggaaaaatatctagatgaacatataattttatcaccagtggaattacctggacgaggttcacggtttaaagaacctttgtgtgataataccgataaagtgattgatagtatctttgattttgtaaaggatgaaattaaagattgtaactatgctatctttggatattgcgttgggactgttctggtatatgaattatataaacgcatcgtagataataatttaagagaaccttctcattgcattctttgtgcgcatcctgcgcctaatatacctaaaaaggacaaaccgttaaagaatacatctgaagaagagttaattgaagaatggcttagggggagccgtattactaaagaagatcttaaaaataaagcatatctaaaaagcttttttcgtgtttggaaatctgattgtaaaatgatggacaactatcgcttttcatatcctatttataaattcaattgtaaccttacactgataggtggtaaggaagatactttttttgcaccaaatgaattaatagatgagtggaaaaaattctcaaatcataattgtaataaatatgttgttgatggttcacatgattttcttaagactaatgaatcagctgtaatagatgttattaataaagtcttataattggcatgaaagctagattttataactaagaatagattgctaacgtacttttagttttagaaattcaacattgtaaactaagccgatataaaaattataaatgtattagttcatacttataattagtgtttacataatgcagagtatacattggatacctaaatttaacaaaaagagacgtaatataaaatactattactttatttgtaaaaatgtctaaagatttaggagacgcatttttaactgaatattaaaagaacatgggcctaaatagtctattatgtgtcaatttctttatacaatttttgtagatgatttattagaaataaaatttagaggtggagattaaaatgaataataatttaaagaatgaaattgaagaaatgataaaaaaattatcgatgtcacatgatgatgaagagagtgataataaagttgaggaaactgcagaagaatatcttaaatatattgattcaataagatttatagagttaataactgcaattgaaagtaaatatgatatagagatagataataaagaccttgtaagagagaacacaaaagaattagatacatttgtttcaatggttgggaaatatatgaaatagtatattaaattaattaatattgtaaaagagttgttgaattcgtaagtttaacactaggtaattatgtaaaataaaaattgaaaagagaggttaattatgataaaggaaaagattttacttccgcaccaatattattatccacatatggacttgttagctgataaaagcacattaaaaaaggaaaacgccttttttagtgaactggataacaaatcaactattagagaagcttcgatttatgttcatattccattttgtgattcaaaatgtgctttttgtggatttgataaagttaaaaatacaaatgagattcctaaatataaagatagaataattgaggaaattgaaaattatgcttctaaagagtatataaaaaacttgagagttaacgttattcatattggtggtggtacaccgactattttacctaaagatgtatttaatgaaattttaaatactattaaggaaaaattcaatgttacagatgatttaatagtaaatattgaaggttctgccactacgatatataaagatgaagtaattgaatatataaaggaaaataatatttcaaaagtaagcgtaggtgtacaaacttttaatcagaaattaagagaccaatataaatcaaaggccacattagatgaagtttatttgacattatcaaagctaaaaagtaataacataactacaggtattgatattatgtatggattcccagattttaaaattggggatgtaaaggaaataactttcaacgatattagagaagctataagattaggagtagacgcaattgattttggacaaatgtaccctttctgtaataatttagagaaaagggttgaagatgaaaaattaggattccctaatctagaagaacttgtggatataattacaactgtaaataagatgatggaggaagcaggttacgaacaaaaagcatcttatggctacactaaaaaagataaagatatattagtaatggaaactgcatattatggtggaattcataatgttcctgattgtattgctcttggctcaggcgcttttggatttataaatggatataaatatagaaataattcatataattcttatataaatggaggcagcactagattttcacaactaaaaaaattaacagagaaccaattggagaatttaaatattgtaggatttcctaaattgttatttttatcaaagcagcaattagcacaaaatggtggtgctaaatatgaaggtaaaattaaagagctattaaatcaaggattgctagaagaagatgagtatgcttttaagataactgagaaaggaaagtgttttattgataatatatactatttccttttagaagatgaggagaaacgcgtaatagaaaaccaagttagagtattgactatccgatagaaaacgcaaaaaaatcgaattattaagtttgaaaaagctcatataaaatattatctaaaagggaagtaggaataatgaagcaagatgtaagttataagggtgaatttgtttcagatgatttttggcatgtaaatactaggaaaatagtattaatgttaaaacaaaaaaaaattggatataaagatatagttatatgtaaatcaaattctcatattggagtttatattcattggttagcatgtgttgaaatagggtttattcctatatttgtatcttcagaattttcaattgatagtattaaattattgaataacaatattggagcaaaagtagttttggagagtgtaggcacagatcattatgtatatttgatttcggatacttgttcaaagtctccatttttaaataatattaaggaaaattcaataattcacttgacttctgcaacaactggaaatcctaaattagtagtaagaacaaaagaacagattgattctgaaattactagatattcaaaatatttaaatatagatgagaatgactctattttgcctatagtacctatttatacttcgtttgggtttatatccggaatgctgcttagtatgaaggtaaatgctaagttaatacttcctgatatcatattacccagaaatataatacaactaagtaacttaaacaaagctactgtgatgttgggagtttcatacttttatagaaaaatgttagctatttctagtaaatatacattaaataatgagttgaggtatgtaatttcatcagggggaccaatggaagaaggactacaaaaagattttaaagatagatttggaataaaattattacagcaatatggttcaacagaaaccggtagtttatgtattggctgctcagaggacagctatagaagtgtaggaaagccaataccaggtgttaaatttaaaattattaatgataaagatgataaaccatgggtatatgtatcttcaccaacaacaataggtgcttatatgactaaggatggaattgttgaattagataagacactatataaaattggggatttaggtagaataaaagaaaatggagaagttgaattattgggtagaagcgatgatatattagtcgttgatggtaagaaggttgataaaaaaatggttgcttcagttataaaaaaaatcaactgcattgataaagtaaatatttttttaactaaaaacaacgatacaactgaattaacttgcgagtattgcagtgataaaaaagtcacaaaggagacttttgtaaatcattgtaagatggttcttgctaactatcaaataccaaaaaaattcttaaaagtaaatgaaatgaaaaatgtgggtagaagctcatggaaaacagaataatgctatgttgactaaataactgataattaatatacattatcatgatatactggttggattacattgaccagtatattaaacatagttttgtaaatatcattaaaagttgtaattaaatttgcttatgttgatatggtgcttgggagatgcctaatataataattttgaaaggatgtttttatgaaaacaaaagtattgttaattaaagctgatgaagaaccaatgaaagcagttgaaaatccaatgccaaatcaaatttataagaatcctcatattatgattgaagaaagaacgttaggaacgttagatcctgataaaattaggatacagatgctttatgttggggtttgcggttcggatattcatatacttaaaagcaatcctgaaactggatacatatgtagttctgttcctgttgaaattccagaagagggtaggattattgggcatgaaggagttggccttgttttagatgttggatcaaatgttaaagaaatagaaaaaggtatgtatgttactttggaatcaattcttgtttgtaataattgtgatgtttgtaaaagaggagactttaaccagtgcaggaatgccaaactaataggtttagaagttgatggagttatgggaaatgttgttgatgtaaattctaatttagcacatgatgttactggttatataaaaagtgaagatgatttaatagctatggcatgcgttgagccaatgggtgtagcttatgatgcttgtgaaaatgctaaaataaaagccggagatgttgttgttatttttggaggaggtccaattggaatatatactgcaatgttaagcaagttagtatttggagcatcgcaagtgcatgttgttgagccagttgaatttcgtagaaatttacttcgagaatggactaaatatgtatatgatagtcttgattctctaaaaaagaatttgaaagaagctaatgttattattgaaacatctggtgatttaaataatgtaaataaagtattcaatataattgatgcaaatggaaaagttgtgcttttagcaagaagcggtgagccactttttatagatgctgttgatcatatgattactaataatattagcatagtggggtcacgtggccatttatgtggtgcatttgatagaattttaaggctgcatgcatctaaccgaataaaattagatagtattgtaacttctgttgttaatggtttagaagatcttaagaaagtattagaaagtaaagatatagtaaaagataattgtaaggtagttgtaagtcttaaagatattaataattaataagatttgtaaacttggaataaaaaatcgataaatatttgtaaaaaacatacagtaacagtattaggttgttaatatatagaggagttgtcaagataatgattaatattacttataaaactttatgtgaagcttttttggatatgcataattataatgaaactcatacttttattgaaaatgctgataatgaaattaacattacatcagaagatttaaaatcaagagtgttaaagattttgcattacatgcaatacattggtgttaaaccaggagatgaggttgtttttcagattaaaagtaatatagattttgtacatgttttttgggcatgccttttaggtaggattataccagtcccatatacataccttgaatcagaaagggataaactaaagttacttaaaatttggaacaatttaaaaaatccatttttagcgacagatatagacagttttgaaaaattaaaaaaatttatttataaaaatgatttgagtttcaagcttcaggggattattaataaagttataataactgaagaaatggagaaattagatgaaaatgttgaaataattcttcctaatgaatcagacattgcatttgtacaattttcatctggttcaactaatgatccaaagggggttattataacacacaaaaatattatttctagtgtaagagaagctgtaaaagcaatgaaaatatctgaagaggatatttatctaagttggcttcctttaacacatagttttggtcttatagggacttatataactccatttttggctagacttaaatattatattatgccatcaaatttatttgtaacctatccgctactatgggtgaaaaaaatgtctgaacataatgtaacaataactgcagcacctaattttgctcttaaacatgtatgtaaatacatatcgattgaaaaagatattgatatggatttatctgcattaaggataataattgatggcgctgaaccagtttcaccagatacttgtagagaatttaatgaaaaaatgtatgattttggaatgaaaaatacaactgtacgaccatcatatggtttgtctgaagctacgttagtagtgaccactccaaaatgcccacaagaatttagggaagttaatgttatgagaaatcatgttaaaataggtgaaaaaataattgaaagtgatattaaaaatgataatgttataagttttgtagaagttggggcatgtataggtaattgtgaaatcaaaattattaatgatgatggcgaaaaggttggggaccgagtagtaggttctgttttacttagaggcgatatgatttctactggttattacaataatccagaagcaactaaaaattcaatggataaatatggatggtataatacaggagatttaggtttcctaagagatggtaatcttgtacttaccggaagagtaaaagatgttatatttgtaaaaggagaaaattattattctcacgatattgaaaacatttgtcaacaggttaatgatgcaaaatttagcagagttgcagtatgtggcgtatacaatcataaaatgaaacaagatcaagttatttgttttttggaatatgatggtgatgtagaaatgttcaatgacatttcattaggaataaaacgtcatgtaattaagaaaataggtataggtattagtcatgtcattccgattaagaaaattcctgttactgtgagcggtaaaatgaaaagatatatactttcgcagcaatttatgaaaggtgattttgacgagacaattcagaagattttatcttaatgatacttaataagaaggatattttaaattatgattagagatgaatatgttaatgagatggtatttaatcgcggatgcgaaataattaaagcaagtttatgtgtgtacaagttttcaagtgattacagctatagatatacagaaaaatgtattcatccgtctgaggaagaaatctataattcattaaattatgggaaaagtatgaaaaattatcttttaggaaggtatgtagcaaagaaggctatttctgaatttatacatcaaccaagacttaatgaaatattaattggcaaaggaattttcaaccaacctattatcttgaaacctagcaatcaaaatattcgagtcacgataactcattgttcagaatatggtgttgcggttgcatttccacaaggttatccaatgggagttgatttagagattataagtgatagaaacaatagagttgcagaaacccagcttactatagatgaaaaagaattaatatatatgcataaactagatccggtgttgttatggacaataaaggaaagtttatcaaagatattaatgaccggtatatcttctccatttaaaatttatgaaatagataaattaaattttaattctaactatatagtaagtttttttaaaaatttttcacaatataaagctatatccataatttcaggaaaatatatatttaccttagtgcatccaaaggggttgggattattttttgatattgaaggttttagaagtatatttaatgatgagtgactaaggggggatttttaatttggatactatgtatagtataaatcaattaaaggttggaagtattaataattgtacatatataattattaataatgatataaaagaagccgtaattattgatccagcatgggatttagaaaaaatagtggcaaatcttaatacaaatggtgtatccctaagctcaattttattaacccattctcattatgaccatacaaatttagtggaaccattattgaaaatttttaattgtcaagtttatatggctaagaaagagatcaactattatggatttagatgtaaaaatctgaatccggtaaatgattcagataaaataagtattggcaaattaaaaatggactgtgtgttaacgccaggtcatacagctggaggcatgtgttttaaacttgaaaacaagttatttacaggagatacgatattcatacgaggttgcggcatatgcacttgtaaaggtggggattataatgaaatgtttgaaagtataaaaaaaattaaagaaattgctaaaaaaaatgttttgatttacccggggcattattttgaaggtgacttgaaatatgaatcggagtatttaaaacgaaacatatatttccatattaatgataaagaggttttcaaaaaagtaataacattaagtagtaaaaaaaatgattatgcaaaatatgaacaataattttaaaatatgattgtaaaacttaaggtgagttttttaaatattaatagttataataaaagttatatttttatagagttaaaatgttttatattaatttaggaggagaaatatggatactaaaaaactatatacaataatagaaaaattgagcattattaatgtgagtttaaaagatgttgtacccgataagatggtaggagatgttacttttgagacatcaataactgaagatttggcacttgattcaatagaaataatggatgtactactaaaaataagagaaaaacttacaagtacggaaagtgatgtggaagaagatatcgatattgataaattcttgatttacttatttaacgctggagatagaggcattacagttcaatctttatgtgatttcatagatgaactttcatagtatattttgttaatataagttttttaaaatatatagtagacatggaaggggagttaccagagttattgaggacattcatagtaacatgactttgcagaaaagtatatgcgtttaagtcaatatttatgactatataattgaattaattaaatctaaacaaatactgtttctttttacaatgatgataatctacgtaaagagtattttaaattatagagaggaagataaaaaatggaagaagttaaaatagttaattggggaatttcaaaagatttacaagcagatattagatatgaacctaatgcatgtaaaggatatgtaatggatctatctcttggatgtccacatcattgtatatattgtttgttttcaccattagaactaagagtttataaattgcaaaatccgaattataagggcgatgttttacccttaaaattggataagtttcttaaaaggacaaagtttccgccttctgtatatttgtgctattcatcagatcctcttggaaatgatgaaattaaaaattcaacaaaaatagtattaaaaaagttatttgaacataatgtaaatgtattgtttatttcaaaaggtatattcgacgattcaataattgatgtaattaaattaagacctgatttaatgaatgtacaggttgatgtgtccagctgtgatgatagaagaaacaaaattattgaaccaggagcaccaacatataaggaaagacttaaaaaccttgaaaaactatctaaaatagatggactggcatccctggttgttagaatggaccctttattaccggatattgatgataaagaagagaatataacggaaattctaagagatgtaaatagtttaggtgtaaaagaagttgttgcagggtatatgattttaactcggaatatgaaaaattcgtgggaaagaaatgatttcacacgaattgccactaaagcttttactgaaaaaacacctacaatttcacaacaagaactttactctataccatttgacgaaaagatgaaaagactgactcgcatacgagaaatatgtattagtatgggcatgacgttatcagtatgtggatgtaaagatgaaagatttaaaaagacggatcttgaatggatatgtcatccatttaacagaaaaagaagagaagaattaaataaagctgcaacctcagatatgattatggaaatcgatcatttaatttaaaattagttaaatttcgaacatacacttaaagattgtataataatagaaaacaaagtaaggatataactcttaaaagcattaatattagtcacgtgacgcatttctaatttttaactgaattcagtaataaagttttagatgcaaactatgtaaatgaattattaaatcaattttattcatggaaaacatgttgcataattctgctaaagttcaatatacaaaatccgtggcatagtggatgcttgggatacaaaaaaatatatttaatggaattaattaaattaaattgtttccgaaaagttttaactctatatgaaatttgcttctatattacttttgtttatgttgcttctattttattttgtaaaaagtatagaacgatattgtttttagacatgttctaatttttaaagataattattttatatgaatataaaatgaattgattataaatactttaaattttaggaagaatatcataatgaaattagtgggaaacatatattgaagggggaaaggaggaataagattaatgttatcaattgataaagaatatgaaataaattattatgatattgatttaaattggcaattaatgtttacgagtgtaatgaatttgtttcaagatacatttgtgcatatgtccgaaaatttaggaagaggaatacgatatcttaatagtataaatttaacgtggatggtaaataaatgggaaataaatatgtacgagtatccgacctataatgaaaaaataaaagtaagaatgactcctattgcatatagaaaatctcttatgaatatacaatttgaaatatttaattcgagaggaaagaaagtagcagatgctttttcattatggattttgttggatatgaagcaaaaaataccgtgtagaaataaatttgaggatatgtttgaggtatatggattaaaagcaagtgaaaataaaattaatactatgaaaaaaattaatatatcaaaaaatttaattaatactaaaaaattgaatgttggatattgtgacatagatactaatggacatgttaataatgtaaagtatttatattggatactcgatactatatcagaggacatagtaaaagactataagataacaaaattaagaattagttataaaaagtctgcgaactatagtgatataataacgttaagttttacaaagaatattgagaataagttaattgtatattcacacaaaattgctgataaagagaattcagtgctagtattagcagaaactgttttgcaaaaaagttatgtagataaatgattataatttaaatttagatttttcgtattctactctaaacttgtattaaacaatattgagcaatgatactaagttaacttacatattactgttaaaatttataagttataaaaagattatccttagtaaatttttttgagaagtgttttgaatattaactatgcatggaaatgagtaagaaaatttgctataagttagagccttcttgcagataatatcctttttaatttaatattattgtacgttaattattaatactaagtcattgaataaagtactttaaaaaatttgtccttatattagttaaaatataactctagagtgaattatacattggtttataaatttgtgagccagttaaaaagtttaaattttagtgattcaggtatctaattattcgattaaagtgcataagttctaagtatagactatatgactgaactgtagttggtgtgaatattaaatttttttattgatgttatttataagaaagtggttagtgtatatcagacagaagtataattgttattgtttctttgatgaacatccaaaaataaattcaataaaattttataacgcttaaaacaattggaaataaggattacaatgtaataacacagttggtaaggggatttttataatgagttttctatgtgtaagaaaaataccatctccagaggaaattaaaaaattaattcccctggaaaataatctaaaagagattaagagtgaaagagatgcagaagttaaagaaatacttgctggaaaaagcaataaattcattgttatcataggaccgtgttcggcagacgatgagaattctgtttgtgagtatgttaacagattggcaaaagtaaatgaagaagttaaggataaactttttattattcctagaatatatacaaataagcctaggactacaggtaatggatataaagggatgtttcatcaaccgaatccagaaaaatcacctaatatttttgatggactaatttctattagaaaaatgtttattcgttcaataaaagagtcgcatcttacatctgctgatgaaatgctgtatccttcgaatcatatgtattatgatgatttattaacttatacaacagttggagcgagaagtgttgaaaatcaacagcatagattaactgctagtggtgttgatattcctgttgggatgaaaaatccaacaagtggtgatatatcagtaatgttcaattcaatccaagcagcacattcaaaacataatttcttatacagatataatgaggtgaatacaactggtaatccatatgctcatgtaattatgcgtggttcagttaatcagcatggtaaaaatatacctaattatcactatgaggatttaatgagagttgctgaggcttataataaatatgattttccatatcctgcagtaattgttgatgcaaatcatgctaattcaatgaaaattttttcagaacaacctcgaatagtacaagaagtacttaatacaagaaagtataattgtgatataaaaaatttagttaaaggtgttatggttgaaagctatatagaagaaggatgtcaaaaaattgatgatcatatatacggtaaatcaattactgattcttgtttaggttgggaagcgaccgagaagttgctttattatattgctgaacaagtataaaaattttttggtgaatcttatgattgagaaagatattgtattgtaattcagagtgattttttaaatttatagaggtaaatctatgaaatacattaaattattagttttttgcagtgttaactgtaatataagtcacaatactagttttgtatctttagagatataatgatgaattcattagtattaatggaagtaaatatataaaaaataatattctaatttacttatctcaaggaaagtaaggtttgtaattatataaaattaattggaaaaatttcatataacaattttaaggaatataaaataagtaaataaatctaataatagtatgtgaaaaacacagctatatttaagaatattgtgatattttaaaattgaactgccccctgtcaagtagacagatgaaaaaacaaaaaattatgaaaccaaggtctgatttcgatattcaattggagtcagaccttttaagtttttctgtagtctttttgtattatagaaaactatgtattcatcaatcgcttgtctcaattcttcatatgtataaaatttttgcaaatagtacatttcacattttagagttccccaaaaaccttccattggtccgttgtcgatacatctgctgacacgtgacatgctttgagttgctttgattttatcaagtttagctttgaaagtcctattagtataatcgattaagaaaaagggattgctccctttccctcatctaagaaccgtacgtgagagtttcccgctcatacggctcaagcatttcttcaccctttcaggcggcaacaaatatatgcagttttatctttcttttatcaaaatagtccttgtctaagaaaggtgtttttgtaacctgcaattttggatgtctgactattttaatccgtcttgaaaagccatcttttccaacctttttcatgccagtatttatttaatctccaccatttgttcttattgggatgtctatgttttgcccattgctgtagtaactgataaagggtgttgttaatatttgaaaaacaacatgtttgtggtaatttgtccaacctcttacgacttgattaagccttcttattaggtcagattgggtgctagctttaccctccttaaggattattgttgaacatttcctaattatgtttttaattgaatttttagaaggtttcactattaatttccccctgtatttcttaaatgtccagccaagaaagtcaaaccctttatctatatgtgtaattgcagtcttttcttctgatagtgctagacctcttgattggaggaattgactaaccgtagttttaagttcttcagcaatttcttttgagtttgcagtaataacaaagtcatcagcataccgaatcaagttcactttagttttggctctgtaatgattttctattttaccttttgaatttctatgatatttatcttgaatcactttttcgagtccatctaatgtcatatttgcatatatacttgagattgcaccgccttgtggcgaacctgtttccgttggaaacagcttttcttcatatatatatcctgattttaggaactgcttcataataattttatccattggtatattgttttgtaaccattcatggttaatattatcaaaacaacctttaatatcaccttcaagtatccatgttggagaacattttctagctaatacacaaaatatctgctcacaggcatcttttgcacttcgtccacggcggaatccaaaggaaatggaatcaccttttgtttctgcaattggctcaagcgctaatgcatataatgtttgcattgctctatcatacattgttggtatacctaatggacgtttctgcttcttacctttcttttcgatatatactcgttttaaaggttttgctttatagtttttgtcagtaagtgaaagcacagctttcatcttcgaggcagaggtataccatagttttttgtctactccagatgtattcttccttttatttgttgttacttttcttacagcataagccttagctgaaaaagagtgggttaataagtattgtaatcttttggctttattattgtctccatttttttgttgccttagcgattcgggtttgtagtctattaacatcgagttcaacttgcttccagtcaattgtttcccattgaaattcaagtgatttcgtgtcttttagtctctcggttttaaccgtcgttgaattactaaaattcataaatatataatcctttcttgctaagaaataccataggataagtctgcactctttcgagttaaggcaaattttgaacctttatctgtttccattacaaaatcagcattcgctttttatccttttcttctgccctctatgtcttttcgccccttgcggttagatacctctcactgaaggaacatatagggtttaccaagttccacgtaatacataattgtaaatgccttaggagtcatctttaaaccgggagttctttatccattcgcattggtttaacagttggcctttgctcagctccttaccattttggtcaaagcgtttcagcctatttcgctttctccagcgtaacgattcctacaatgattcactttacgttctccatagcattcttactctagcagttgttccagtttaggctactcgaacttccacattgtctcgtgagctttctaacccaaacgttaccattcacgctagtcacgatagagttaccccgaatggatggggcagtctaacgacaatgtattacgcgacttcttgtcgcacctgaaatcctctgtcactatgaaacagtggctttgcagtcggattagcacttactgctaaatcaaatgtatcaaaaacaagctgattgttatttgagtgaccaacaacataagaaacaatgctcttatcagctaaatcaaatattgcgctaaggtaagcctttttaccattaagtagtttaaattcagtaacatctgttaaccatttttcatttggtttctttgcataaaattctctatttaatttgttttctgctgtaatttgtggagtactttgaatataatgctttctcttttttcttataactgatctcatgttaatagatttcattaatctataaattcgtttatgattatactgtttatccagaagtctatttatattcattgttatccgacggtatccatagataccatttacatcttcataaagcttaacaatctcttttagtattattgaattttccttatctaattcagtctctgaacggttaatccatttgtagtaagacgatcgtgcaatcccagctaaattgcatagatcagctattggatagccattttttttatgtaattcttttatagaaatatatttatattcttggagtcttttagtgcttatcgccttctttctacttccttcaatttttttaagaaatcaatctccatctttaaacgtctattttctgcttcaataagttttaattgtgcggataatttatcagactcagtaatctcatcagtatctttacgcttaccgcgacggtctattagctcttcatatccattagctttgtattttcttacccaggtataaacttgttgataagaaacattaaatttatcagcagtagcttgataatcatcattattcgaaatgcagaatgcaacaatctcaattctttcttcataagtagtctttcttccattagtcataattctatccccttgcttattatgagatttaattgttttatgaccattatacttcttaatccaatctctgagaacacgaggagatgaaatttcatatgtgcagcatatatttcttaaagagccttttccagctagatataagtttaagcgaatcagaataatatttgttttttgtagaaactattaaatttgcttcaccaacatcattatatatttttaaccagtcataaaaagtggcactatgaattaccaactcatcgcatatctgtacaactgctttttctcctaatagatattctgtaattcctttcactttctcttctaaagaacatttcatttttcttgacattaaaataccccctttatagaaacagttttattattttaactgtctactataaagggagcatatcaattatggattttcgtgggtcttttattttgtgaaaaattatattttgggtgaatttataaataaattctatgatttacagaatatatagatgaatagtagattttattattcatgtgtaaaattatagaagaaacaagaaatattagatataataaaagtagtatgatggtacaaaagaatttatgggacggagatacatatggaaaaagaattttcaggattattccattttacggctgatacaatttggtttgataaagtgcttattcatataaatgggtgtagcccactcgcctccatatgatttgtagtcagctgctatcactacggataatgaatataaaataaattcgctcaaggctaagaataaataaaatttcactgcgttttgtgcattgagcgaagcgtgaaaggaatggttataaaaatgaaaaaaatatttatgcataaaatctctgctgtttttatacttttacttatgtttataggtttatttgggtgtgcagcaacaaataaaactgctgagaataagcagcaggataaccatgtggaagctacaaaatcagaagataaaaagatagattccagccaagatggagattcaaagaataaaaaaattattaatgattttcaaggcgttgcagattatatacataaaaatggaactttgcctgaaaattttataacaaaagcgcaggctaataaacttggatggaagccaggagacgatcttagcaaagtagcgcctggtaaaagcatagggggagatatttttaagaatgctgaaaaatctctaccagatgcgcctaatagaatttggcatgaatgcgatattaactataatggaggacatcgtggggatgataggattctttattcaaatgatggattaatttactctacctcagatcattataaaacattcaaattattatataaaggaaagtagttttttaaggatgtgaatagcttgaataaagtagtaatacaaggcagtaagcttacggatagaaatatgttacaccaaattttaaaacaggaattaaagcttcctgctcattacggtgaaaacttagatgcactctgggattgtctaacagctgatattcaattgccagttacaattgaatgggttgactttcaaaaaagtaaagacttattaggtgattatgctgaaaatacattagaaatttttaatgaagctgaaaaatttactggaggaaaacttaagataaaaattatttccaacttttaattgactcaaacttatatctatcttgattgaaaaaaacgttatcagttgatataatgtatgcaatagtccaatggaaggaagtattatatgttcagttatagtcaaatcaaaagtcttaatgatttagaaatttctgtttataattatattatggataataaagataaggtccgatatatgaaaataagggaattagcagttgaatcgcatgtatcaactacaaccatattaaatttctgcaaaaaagtaggttgtagtggttattcagagtttaaactaaaatttaaattatttatagaagaaaaagaaattaaaaaagtaagtgaagataatacagagataattgacttttttaagaaaacaaatactgaagaatatgatgagaagatagaggaaattgtaaaagctatattaaaagcaaagagaacaatttttataggaagtagtatgtcaggaattatagcaagatatggagcaagatatctatcaagtgttggacaatttagtttatgcattgatgatccgtattacccgactacaggtaaattttatgaaaactcagttgtcatagtatgttctgtgtctggagaatcgaaagatattataggccatataaatagatttaaaaaagataattgctgtattgttagtattactaatactgaaaattgcactatagcgaaaatgtctgattataatatcccctattatgtgccatatgttaaagtaggaatatatgatattacaactcaaattccaataatcagtataatagaaagaattggaaggaaactacaaaatcgtcgagaagaatctatacaagatgagtaaatagctatgcgcaaaaaataaaagtattttacatagggctttattgatttgaagtttttaactcaaattgataaagcttattttaattactctttttgtttgttaatcacagttttttaaatatatgaaatgtcaagaacacatttcgattttaattgcaaaaaaacattttgtttttttgcaataacaaattattaaaaaacagacatgttttttataatggtttacatagtgacagaataagctttttcaattaatattaagatacattcaatagctattcgaaaataataaatataagtgaggtaataaaatggcaaaggattatgcattaattgcgaaaacgattgcaaaaaatttaggcggtatctcaaatattgaaagtgtaactcattgtatgactcgtttaagagtttgtttaaaggacgactcaaaagtaaatgtagatgagattaaaaaaattaatggagtaatgggatatgtaaaccaaggtgggcaacatcaagttattattggaaataatgtatcttatgtttataaggaagttttaaaattaggaaactttggagatcaaagtgacattgcaaaagggataaaaaaagaaaagctaactatcaaaaaagttggaactaatatattggatgcattagtaagtacaatgtcaccattgataccagcaattattggtggttcaatggtaaagttagtagtaatgatgttatctatgttaaaagtactaccagcagacagtactacatatacattactaaatgctatgggagatgcagcgttttatttccttccaattatggtggcagtatcagcatctaagaaatttaaaactaatacttatttagctattgcaatagcaggacttatggtacatccagattttatgaaactaatggtaagcgcatcagaaggtaaggaagtaactttagcgtttattcctattgcatctgttaagtatacgtatacggtaataccagcactttgtatgacttggatattatcatatattgaaagatttgtagataagataacaccagaagtaactaaaaatttcttaaaaccagcgattatagtattgattgcggctccaatagcaattggacttataggacctttaggtatatggattggtacagcaatatcaggtttagtttattttgttcacagcaaattaggatgggtatcagtagcaataatgggagctttatggccactacttgttatgactggaatgcatagagtatttactccaactatattaacaactatagcagaaacaggaatggaaggaatggtaatgccttcagaaataggtgcgaacctttcattaggaggatcagctttagctgttgctttcaaaactaaaaataaagagttaagacaaactgcaattgcagctgcttcttctgcaatcattgcgggaatcacagaaccagcactgtatggagtagcattaagatttaaaaggcctttgatagcatcattaatttcaggtggtgtatgtggtgccgtagcagggatagcaggactcgcaagtagatctatggctgcaccaggtttgttcacaagtgttcagttttttgatccacaaaatccatcaagccttatttggataattggaataatgatactggcagtcgtattatctttcgtattaactctaatatttggatttgaagatattccagcagaagataatattgaaataatgggggcagacaatgagtaaatacagtttcccagaagaatttctgtggggcggagctattgcagcaaatcaggctgaaggtgcttatagagaagatggaaaaggtttaagcactgtagatgttataccacatggaataaacagaatgaaagtaaaattagggttagaagaagatttggctttgaaagataatgaattttatccaagtcatgaggcgattgatttttatcaccattataaagaagatattgctctgatggctgaaatgggatttaaagtttttagaacttcaatcgcatggacaagaatcttccctaatggagatgatagtaaacctaatgaagcaggaattaaattttataaagatttatttttagaatgtaaaaaatataatatagagccattagtaacattatgtcactttgatgttccaatggaactggttaataaatatggatcatggaagagtagaaaaatgatatcattttttgaaaattatgcaagatgctgctttaaagaatttgatggcttggttaaatactggctgacatttaatgaaataaatatattgatacatagtcctttttcgggggcaggtatatatttcaaagaaggtgaaaacaaagagcaggttaagtatcaggcagctcatcatatgttagtagcaagtgctttagtaactaaaatagcccatgaacaaaatccagaaaataaagttggatgtatgcttgcaggaggagatttttatccgtactcatgtgatccaagagatgtatggatggctcatacaaaggatagagaaaatttatttttcatagatgtacaagctagaggtaagtatccatcatactcaaagagggtatttgcggaaaaagaagttagtattgtaatggaagaaaatgatttggatatattaaaaaatacagtagattttatatcttttagttattatgcttctagatgtgcatctaaggatatggaaaatcaaaccgaagctaatgttgttaaatccataaaaaatcctcatttagaagttagtgaatggggatgggctattgatccgttaggtcttagaataactatgaatacgctatatgataggtacgaaaagcctttatttatagtagaaaatggactaggtgctaaagatacaatagaagaggatggctcaataaatgatgattacaggattgattatcttagacagcatatcatggaaatgaaagaagccatggaagatggagttgaactattaggatatacatcttggggatgtatagatttagtttcagcatccactggagagatgagtaaaagatatggatttgtatatgtagataaacaagatgatggaactggaactttagagagaaaaagaaaaaaatctttttattggtataaaaaagtaatagaaacaaacggtgaatgtttaatataagaaatttaaaggttacgctgcactgtaactataaagcccaagacaatatttattagtattgtcttgggttattttggtttgtagatattaagagaatgacatcactataaaaaacatattaaaaagtagtaatagaaaagtattttagaattagcaaaggtgaattatatctaaatgacgcaggatttttattaaaaatattgatattatttttaattttatcttttaaaaataacaatcaaatccgtttttaagaaatatatttttataatctaataaatcttcttcatgaagttgttgcgcattttggaaagtatatggtttgttcagaagttcgtattttttctgcccaaattgatgaaatggaagtaagtttattttcttagcattaacggattcaagtaatttacaaaatcctttagcatcttctaaactagagtttatgttgggaataacaggaatacgaataataacatctttaccgttatctatagcaatttttaaattttcaataattagatcattataaacatttgttactttaaaatgcttttctctatcatagtgttttatatcaaataataataaatctacatcatctataaaacttgagaatatttcatttgaagtatagcccgtagtttcaattgttgtgtgtatatttttttcttttaaaacctttaaaagctgtgatgcaaattcatgatgcattaatacttcaccaccagataaagtaacgccaccatttgattcttcataaaacatttcatctttcataacttcattcataacatgagaaagggttaaaaattcaccttctgctgaaagagctttatgaggacaggaatttttacaagcaaaacaagaaatacagttgttagaatcaatttttatatgattatcatttaaggaaatagcattattttgacaaacgtctatacaatgaagacattgtgtgcacttagctttatcacatatgatttgtatcttactatcttgagattctggatttgaacaccataggcaacttaagggacagcccttgaaaaaaactacagttctaattccaggaccatcgtgtatgctgtatttttgaatattgaaaatgcaagcctttatatctttcataaaaacacccccatatagtaaaagcaagattagtattatgattgaaccgcaataatttaagtttcaattgatgattcaatgttaacatgaaaaaatataagtgtaaataaaaagtttcatttgaaataagtgtatatttcataagaataataatttgatgtttaatattatttgaagtagtatataatcaataataagcagagttccttttattcgaaatataaatagttcattttgtaagtagtttatgatataattaccattggatttaggcatgtcgactagttattttttgaatatacctaagagaaggaggagtttctatgacaagtaggtatacaaagcttcttgaaattgtcaatgaaaacaagcgtatagaagtcagtaaattatcagagcttttaaatgtatctcaagtgactatacgtaaagatcttggtgcattagaagaaaaaggattattgaagcgtgaacatgggtatgcagttatgacttcaagtgatgatatcaatagcagattagcttttaattatgatataaaaagaaaaatagcacaattggcaagtaaacttgttaatgatggtgaaacagttatgattgaatcgggctcatcttgtgccttacttgctgaagaactcgcatataataaaaaggatataacagtaataactaattctacatttattgcaaactatattagagaaggaaatgcgaaagtagtgttgcttggaggagattaccagccggaatctcaggtatcagtaggccctctaacaagaaagtgcgttaaagatttttttgtagataaattgtttatcggaactgatggttataattctaaaatagggtttacaggaaaaaacttaatgcgtacagaaacggtaaaagccatggctgaaagttctaataaaattataatattaacagaatcatcaaagttttctgagcgtggagtggtatctcaatttaaagcagaagagataagctatttatttacagatactaatattcctgaagatgttttagaaagtttaaagaaggaaaaagtggatgttcaaatggtaagtgtagaataagataaaccaattgagatttaaagctatgcgataacttgccgaaagagaaggagatctgttactcggttgctaaaaaagtaattgtggatttctaccagtaaaggttgcacccatccctgcatgatcccgagccagctcgtgacaagcaaggttggaacaacttttactgaagaaatgcctacaatcattttttcaatgcaacgctacgcaaaagagcaccttctctttcttgtatggcatatatttcaaattataaataatttggaaaaataagtgaggtatcaaaaggctttttaataaggcttgtaactatttttagacataaatgacctacaaaatatttgtgatttcggtaagtcaccatgtaagttttagttatcacattttattattgtagtatttaaatgctattacataagcaattaaaaaaatgcaaggtataaataaaagaacttgagctagtagtggatcaaaaagacctccaattaatgcagttgcgtatgacactataagcattacaatggctgctaatttaaatgatttatttccaatttcatgaattctttcatctgtattatttagacggcttttcttcagctttatttcatcattgagcaaaagcctatttttaatccataggattgagcttattataataaggtctataccggcagcggagaatacttcatggatattttcactagcagaggttttcatataaagttctgcaccaaaaccaactgctactgtaatgattccgataatcaaaagtacaacaataatcttcatgcgatattttataacatttttatattcttcattagttttggctgtattaccagctaaaattcctttcataaattctcatcctccttatcaaaaataaatatctcttcaatagaaatctcaaaaaattgtgcaattttgtgtgccagtattaaggaagcattatatcttccgttttcaagtgatataattgtctgtcttgttacatttactgcatctgcaagctcaccttgagttatcttcttttcttttcgtaactcttgtattctagtctgcaacttatcactacctttcaaatagtatagtatgctttacaattaaagtatagtatgctttacatcaaatgtcaagtgaactatacatctggtttgaattataaataatgaattgtgtgctagatttacttagaatatcatagttgtttatgtaacgacttaaactcaaaacacttagttagagagcatctaagagaaagtatttaataagattattatttatataaagattcaagtataaaataaatactttcgaatgaaatattatcgttgacaaaatgcaatctaagtatataatttgattatgaaagaaaataaaaatagtttcaaatgaaagtgaaaaagtttgttataatatgaaattgataatgaggggagaatatttatgaatcattttggagaattaactgatagaatgcataattttagagaagaattattaaatgcaaaatctatggttagtgtagaaagagctagacttactacggaaagttacaaagaacacgctgataagccaatggtattacgtagagcgttatgtttagaaaatatattgaaaaatatgactatatttattgaagataactcgataatcgcgggaaatcaagcagaatcaaatcgctcagctcctattttccccgaatatgcaatggattgggttataaatgaacttgatgaatttgaaaaacgtgaaggtgatatattttatattactgaagaaagtaagaatgttttaagagaaatagcacctttttgggagcataaaactttaaaagacagaggtcttgcagggatgcctgctgaaagtagaattttttatgatctagggattataaaagcagagggcaatattacttctggggatgctcatatagcggtaaattatgaaactgtattaaaccttgggttaattaattacaaagagcgaacagaaaagaaattaaaagaactagaccttacagactataggaatctaaataagtcttatttttatagagcaattttaattgtacttgatgcagtagcagcttttgcaaagcgttatgcagatttagcattagaattagctgaaaaagaatctgatgtaaatagaaaagaagaattacttgaaatgtcaagaatattaaataaagttccatattatccagcagaaactttccatgaagcagttcaatctttgtggataattcacttagttttgcaaattgagtcaaatggacattcactttcatatggaagaatggatcaatatttaaatcctttctatgaaaaagatttaaaacttggaaagattactgaggatagtgctactgaattattaacaaacttgtggcttaagacttttactataaataagataagaagctggtcacatacacgttttagtgcaggtagtcccttatatcaaaatgttacagttggtggtcagactgtagataaaaaagatgaagtaaatccattaagctacttaattctaaagagtgttgctcagacaaaattaccacaacctaacttaacagtacgttaccataaaggattatctgatgatttcatgaaagaatgcatagaagtagtaagattaggattcggaatgccagcctttaatagtgatgaagttattattccatcattcatagaaaaaggtgtagatgaaaaagatgcctataactatagtgcaattggatgtgtagaagtagcagtcccaggtaaatggggttatagatgtactggaatgagctttttaaatttccctaaatcattattaatagctttaaatgatggagttgatcccgagtcaggaactaagctttgcgagggtgtaggtcactttaaggatatgacaacctttgatgaggttatgaaagcctgggataagataattcgtgaatttacaagacatagtgtaataatagatagttgtgcagacttagcaatagaagaagttacagcagatgtattatgctcagctttaactgatgattgcattgaaagaggtttaaacttaaaagaaggtggagccgtatatgactttatcagtgatctacaagtaggtattgctaaccttggagattctcttgcagcaattaaaaaatgtgtatttgaagataagagttttacccaagcacaagtttgggatgcattgcttaataattttgaaggagaagatggtaaaagaattcaagatatattacttaatgatgctcctaagtacggtaatgacgatgattatatagatttattattaagagaagcttatgaaatctatattgatgagataaagaaatacaaaaatactagatatggtagaggaccaattggaggatgctattatgctggaacttcttcaatttcagctaatgtaccacaaggagcaggaactttggcaactccagatggaagaaaggctggagagcctttagctgaagggtgttcaccatctcatgcaatggataaaaatggtcctacagcagtatttaaatcagtttcaaaattaccaacacacgatattactggtggagtattattaaatcaaaaggtaacaccacaaatgttatctaaggaaagtgatagagaaaagttaattttattaattagaactttctttaatcgtttagaaggttttcatgtacaatacaatgtagtatcaagagatactttacttgatgcgcaaaaacatccagaagagcatagagacctaattgttagagtagcaggatatagtgctttctttaatgtattatcgaaacaaactcaagatgatataattgaaagaacagaacaagttttatagtaaaataattctccccaagtgaaatgttcattgatattatttatgaaccccacgaccatttgcatgtggcttaaatagctggttgcaggtggtcgtgtttttttgatactggcggcttagtcttatatattttctaaaagatgaaacaatctataaattaatcaatatcagaattaattttatgtttttcttcagaaatcgtatgtaggattctctttagaataatgactgtttgttcttcttctttcttagataagcttttagaaaaaatagcaactaattctaaaaaggttgcatctattttaggtataactttttttcctgcatccgttaaatataacctataaatacgcttatcattttcatcttgaattctttttacataatcattttctactagattttttactgcttttgcagtagttgatttacctacatacagaaactcacttaactctttctgacttataccttcattttttgaaatcacatataaaaaatcatgttggccacttctaatatttaaatctataagctttgaatttattatgctttgagcatttctataaattgctgcattaagtttactaatgttttccatagttacttatctcctttagattagtttcctataaagtgaaacttttcaggtggagttttaactccagctgaatttagttgaacttataccctcaaggggcacattgtccagaagcgtgcagccgttatctcccgcttaaagaaaagggcgtgctacggatgctagctatcggataaaaccatcttaaattatatatataaataattatagtttcaatgatttactaggatatatattttttgaaattatgaattggtattttaaaatatagattatattatttggaaaaagaaaactctgccattgataaaacgcagagctaactttgtatgtgattaatatatgttttgagaatttgtgttacgcactaatcctaaggtaaaatactacttttttacttgtaattgagattttctctttctgccaataatgaaataaagaataaatgctataatagcagccccacttgcccacagatacatttgagcatatccaacgtttgatgaaactactcctaaaattactgcacctaatcctataccacaatcaaatgcagtgaaaaatgtagcattggcagcacctagacgtgaaggtggaactccaaccatggccattgtctgtaaagtagattgagttgcaccaaagcctattccgtaaataaatgcggcgattaaaaacatgctaatatttgaagactcagataacagcaacatagatataattacacatataaaacctggaataattgcatagtcaaaacctaatttatctattattttaccgaatattggtctagatataaataaggatattgcatagactgtaaagaaaattccaatgttctctatgcctttttgtgaagcataaagaggtaagaaactggttaatgcaccataagttattgtcacaaaaaatactataatagaaggatttatagatattttttcatacaatgaagcttttattttagtttgctctttattttcaatttttttatattctaatttaaaagcaataatacccccaagcacggctagtatagtagatgttaaaaatagagcttgaaagctatattttgatatcacaaatagtccaattgtaggagctattgccatagctaaactacttgtcagactaaaatatcccattccttctccaaaacgatcatttgggatattatccgaagcaattgtattagaagctgtacttactgccccccagccaaagccatggataaaccgtatcataataattgcactaataaatggaactattgaataagaaaatactgatataataaatataaataatccaactaaaaacaccttttgtcggcctaacttatcaagaagtaatccagagattggcctaattattactgaagatactacaaatgctccagttactaatccaatgatagagtttgtccctccaagttttttagcatacagtggaagtgtaggtaataacatttgaaatccaaaaaatattaataagtttataacgttgataattacgaagttttttgtccaaagaaccttatccttttgtatatttttttccataaatgttctctcctttgaatattagtttcctttgcaactaatattacaataacataaattagtttcttgtgcaactaatttgtttgatgagttcaataaaacttttactcataactaatgagatttaagttgatatttaaatagtaccaagagtgggggtaagaaatttaagttctaattaatgggaacttatatgcaaataatgttaaaatataataataaagagtataatagttttattaataattcaattactctttaacataactgagtggagaatacactaacattcatataaaaattttaaattatttagacataaatatttcttaacataaaactatggtgtaaattaacaagaaaatattaagtgaaattaaaaagtttacttaatgaagaagggagctaaatgatgaattgggaggcgtttgaaaaggctttaattagttacgataagttagaagttaataaaattcttcaacattttttagctgaaaaaaatgggattgattttattgatgagtatatagttaagtccttgacttccatcggggaaaagtgggaaagaggagaagtagctttatcacagatatatatgagcagcaggctttgtgaggaaattgcaagttctattttggaggaaaaaaatttcacaattaagaatgcaaagccgattgcaatagtgactcttgaggaatatcacactcttggaaagaaaattgtaagtgccgttgtgaggtcaagcggttttgaccttatagactatggttctataagtggacctgaggagataataaagagagtcactgatgatagtataaaaatacttatgatatcagtcttaatgtatccatctgctttaaaaattaagaaaatatctcaaatgcttcatgaaaaggatccttcaattaaaatattggttgggggggcaccttttttaatggacagcactctttgggaagaggtgggtgcagataaaatggggaaaagcgcagccgataatattgctattatagaacaatggatgaaggaggattcttaatggaaaaaaggcatacttctatggaaagagtgttgacaactatgagtaagcatgaaccagacaaggttccattgtttttaatgtgtacacattactgcgcaaaatttttagatatatcaattaaaaactattttagtaaacctgagaatgtagcaaagggacaaatgatgcttctcagaaaattcaacaatgattgtttgaatccattttattctgctgcccatgagtatgcagcttttggaagtgaagttattttcaatgaagcagggcctcctaatgctggtgaaccaataataaaaaactttgacgatattttaaaattacaaccaccagatgttaaaaattcaaaaattcttagaaattgtcttgaaacaatatccatactgaaggaggaagtggggatgtctgtacctattgctggaggcgtgttatcacctttttcacttcctattcttcaaatgggttttgataaatatattgaacttatttatgaaaaaccagagttgttggagcatcttataaaaatcaatgaaaggttttgcactgagtgggctaatatgcaattggcggcaggcgcatcctttataacgactatagattctatgtctgtgtcttcaattattcctaaaagcatatatttaaagactggatttctttctgcaaagagaacaatacccactattaaaagtgatgtagccattgctacgtcctcggcaagctcttcctcaatacttgaggaaatccttgaatctgggattaaagccattctggtaagccatactgatgatctagctgaaataaagaaaaaagttggtcaaagagctacattgcttggaaatctaaatggtattgaaatgtgcagatggaccagatttgatgctgaatataatgttaaggaagcaataagaaaagctggagttggtggtggtttcatcttgtgcgacagtttaggagacattccttatcaggttagtgaggacattctttatgaaatatcagagagtgtaaataagtggggaagatatccattaaattggaggtgattatatgaacgataaactatgtattttaatttgtgaaagtttcaaagctgaagtggagagtatgcgaggcgttttgaaaaatggagagattgaatttaaatactattcaatggattgtataaattgcaatcgtcaaagacagaaattatacgatggccttattgaatcaggttattgtggtgactcagttattttgcttccaactcagaagggctctggaaaagatgagaatcttgttggtgaaagtattttcaattcatgcctgtcattattggctgggggtgatctgataaattacctttctttaatggggtattatttgactacaccaggttggctaaaaagatggaagcatattattatggacatatatggatttaatcaagaaactgcacgtgaatttttttcagaatactgtaaaaaggtggttcttattgacagtggcgtatatagcaatatcatgactgatttaatagagttttcagaatatataggaatgaaatatgaaattatagatgtaggtttggagtacttttcaagcattataaataattcatataaaaattggaaagttaatagactagaatacattttaaatttaaaaaacaagcaggtcactgattatgctcttgtatttgattttcttgaaaaaaaagcaacacttttaaaacgtgaagacctgattaagaatatttttactttatttgaaatgttgaccggtgctaagcatctcgcatttcttcctgtaattgaacataaaaaaggagaaataattttcaatcaagagaagttgtataaaagtgaactatatgatatcgacaactcagaatttaggcaaagttattttcttactgcctcaggagcaggatttatttttaagataacttttaataatgaattaatgggttatatggaagtggaagatattatgtttcctaattatatggaaagttatttagatttatcaaaaacaatcatgataattctaggaataatgctttttaattcaaagatttatgagaaattaattgatacaaatgaagaacttctttcattgaataatgagcttgaggttcttgttgataaacgtacttctcaactgttggaggttaatggaagcctcgaagaaacaaactgtatgttagaagaagaaatcgaagagcataagttaactgagactaagcttaaagctgcaaaagaggaagcagaaagagcaaactcagctaaaagtcagtttttagcaaatatgagtcatgaaataaggacacctatgaatgggattatgggaatgactagcttattggaattttcaaagttgacagatgagcaaattgacatagtaaaaatgattgaaacttcttcaaaacatcttcttcagattattaatgatatacttgatctctcagtaatggatgtaggcaagatcgaactaaagccagaacgcataaatatatttaatttaatgaatgaaagtagaaatttatttacatatttagcggagaataaaggactgaagcttgagattattgttgacaataatttaccgaatgaaatcatattagataagggtagattaatgcaagttttaagcaatttaataggaaatgcaattaagtttactgaaaaaggtaaaattcaagtatccgtagataaagttgaggataaagagaataaagtgaagctaatgttttctgtaaaagatacagggattggaattaaggaagaagacattccgagattatttaattattttacacaattagatatatcagcttcaaaaaaatttcaagggactggtctgggtcttgctatttctaaaaatatcgttgagcttatggggggagaaatatctgttgaaagtcagtatggtaaaggaagtacattctactttacttgtttgtttaatattgctagtgatagtaaggaatcatcaaatattcaaaaaatgtgtatagataacaaggcttatttagaaactaggatattacaagttgaagatgatattatcagccagcgatttatgaatcaattatgtaagattgcagggtggaaaataaaaatagcttcaaatggattagaagcattgaacatacttgaaaatgaggattttgatataattcttatggatattcagatgccagatatgagcggaattgaacttacaaaaataattcgggaaaaagaaaagttaactggtaaacatattactataatcgcaatgacagcatatgcaatgggaggagatagagatatatgtattaatacaggaatggatgactatattagtaaaccaattgaagttatgaaacttaaagaagttattactaagtatagcagcaattataaatagagtatttataaaatattaaaaaatctaaaagcttctacataaactgtacaataggatgcgaagaaaagtaagagtggtctagagtatattcactaattagttaggcaattttatgtgtctttaagatgggcattataaaggtagttctcctatatcaacatgaaacctacgaaaatctggaattcggattttcgtaggtttttattttgtgggaaataaatttattattattaaacttccaataattttcaactatatatttgtattgatattgccttttgtggtaacaattattatatccgaagtggtttatagaattcttgaaattaggtttctatttggcataaaaaataatataaacagtttgaatataaataaataattattatctagacttctctcatcctttatgaatagtgtgtatgttaatttgaatatattatttcattttgttcttttgatgttttaaaatggttaaggaatttctaatataaagcgagtttgaatagaatatgttttttataaaagtgggaaatttatagtataaaaattattttatgaaagttagttaaaaatattaaaaaatgtattgcataactaaaagaaaagtgttaatatgaaaacgtagtctagagaggttcttagagagggacttttagtagactataatgaaataataataatatctagcatgttactgattcgatcaggcataagcatagagaagtaaaatgaagtaatatttattcgttaaaaacacatattttgtacagtttttatagggtattatcatatttttttatgatttaattttggtgtacaaatattgtgacgatatacgaatatatactattgttttatttccaaatgcttatgccttttgtttttgtaacaaataaaaaataggaggtataaaaatggtaggaattattcttgctagtcacggagaatttgctaaaggcatcatgcaatctggtgcgatgattttcggagaacaagaaaacgtaaaagctgttacgttgatgcctagcgaaggacctgatgatcttagagcaaaaatgaaagatgcaatcgcatcctttgacaaccaagatgaggttttattcttagttgatctttggggtggtacaccattcaaccaagcgaatatgctatttgaagaacataaagataaatgggcaatcgtagctggtttgaatttaccaatgctgattgaaacttatggtgcacgtctttcaatggaatctgctcatgaaattgcagcttatatcttaaatgcaggtaaagaaggagttaaagttaaacccgaggagttagaaccagcagatactggtaatgcttcaggagcgggagcagggcaatctaatgcaggtgcacctggatcgtttgaatacgttttagctcgtatcgactctcgtttacttcatggtcaagtagcaactgcttggacaaaaactgtaaatcctacacgaattattgtcgtgtcagatgatgtagctagagatactcttcgtaagaatttgattacgcaagcttctcctccgggggttaaggctcatgttgttccagttgatcatatgattaaacttgcaaaagatgataagcattttggaggccaacgtgcaatgcttctttttgaaaatccaaaagatgtgcttagagctgtagaagggggaataccgctaaagataatcaatgttggttcaatggctcattctccaggtaaggttcaaccaagcaaagttttagctttcaatcaagaagatattgatatattcaataagcttaaacaagctggacttacttttgatgtgcgtaaagtaccaaatgattcaaaagcaaatatggacgaaatacttaaaaaagcacaagaagaattaaaaaaattaaaataatctaattatttagagaaaaaggaggattaataaccatgactttaaatatagttcaaattatattagtcattttaatagcatttttagctggtgtagaaggtatcttagatgaattccaatttcaccaaccgataattgcttgtacattaattggcttggttacaggtaatttactaccatgcttaatcttaggtggtactcttcaaatgatagccttaggttgggcaaatattggtgctgctgtagcacctgatgcagcattagccgctgttgcatctgcaattattttagttcttggaggtcaaggtgaagcaggagttgcttcagcaatcgctattgctgttcctttagcagttgcaggattattattaacaattatttgtcgtacacttgctacagcgttcgtacattttatggatgctgctgctaaagaaggaaatcttagagctattgatatgtggcaaatcgctgctatttgtctacaaggtatacgtattgcgattccagcagcactagtattagcaatcggtgcaggtcctattagttcattacttgctgctatgcctacttggttaactggtggtttagcaattggtggtggaatggttgtagctgttggttatgcaatggtaatcaacatgatggctacaaaagaagtatggccattcttcgcaattggttttgtattagcaactgtttcacaaattacacttatcggacttggtgcaataggtgtagctttagcacttctttacttagcacttagcaaacaaggtggctcaggtaatggtggaaattcaaatactggtgatcctttaggggatctaatagatagatactaagaagggagaggaaacgaaaatgtcaaaagaattaaaattaacaaaaagagaccgtatttctgtttggttccgttcatttttccttcaaggttcttggaactatgaaagaatgcaaaatggtggttgggcatttgcaatgattccagcaatcagaaaattatataagactaaagaagagagagctgcagcattagaacgtcacttagagttctttaacactcacccatatgtagcttcaccagttgttggtgtaacattagctttagaagaagaacgtgcaaatggtgcaccaatcgacgatgtaactattcaaggtgttaagattggtatgatgggacctttagcaggtattggagatccagttttctggttcactgtaagaccaattttaggagcattagctgcttcacttgctctaggtggtaacatccttggaccaattatcttcttcttcgcttggaatatcatccgtatggcatttatgtggtatacacaagagtttggttacaaagcaggatctcgtattagtgaagatttatcaggtaatatgctacaagatattacaaaaggagcatctatccttggtatgttcatcttaggatcgttagttaacagatgggtatctgttaaatttgcaccagtagtatcatctgttaaattaagtgatggtgcatttattgattggagcaaacttcctgctggagcagaaggtgttaagcaagctctattacaacaagcatcaggtatgtcattaactgatactaagattacaacattacaaaataacttagattcattaatccctggatttgtaggattattaattacacttctttgtatgtggttacttaagaggaaggtatctccaattcttataattcttggattgttcataattggtattgttttccacttgatcggtttaatgtagtacttttttacttagcctaggctttttagcctgggcttttgttaacaatattaatcgtgttacttttaatagactttggaataattgataaaagcatgtaaagaatatataataaaaataaatgtgtatataagtagaaaagaggtagataggatggttgagtcactcaatacaaaggtggatctagcaattgatggaacatcttttgctggtgttgcagattatggcaagattatgataggtgacaaaggttttgagttctataattctcgtgattatcgtaaatttattcaaattccttgggaagaagttgactatgtgattgcatctgtattatttaagggaaaatggattccacgatatgcaattcgaacgaagaaaaatggaacatatactttttcttctaaagaagcaaagaaagtgcttcgtactgttcgaaattatgttgatccaaatcatatggtttattcattaagttttgttgatgtagtaaaacgagcactgaaatctacatttaagaagaagagctgatcgactaaagaagtcatcatgtttataaagtaaaacttttcagatagagttttatattcacagttgaatttagttgaacttatgcaacaaagagtattttgtcttgcatttttctttctaccatgaaacccactaaaatagatagtagattttagtgggttgttttaatgtaaaatattcaaatatttatcttgattttatagagcaatgctaatttacaaaagtaaactctaatggatttttatcaactaatcttggataagtatatttaggatatcccaccataatagcaccagtaattttcttattttcagggatgttaaataatttaagtaatggagaattatctttcatagcaattctttcaaacattccagcccagcatgatcctaagcctagtgttggcgcatataactctaaatatgttaatgaaaggattgaattttctcttcctcgtggaaagtttgaatcagcagttgccaggacaaggctggatgctccacgcaaaattgtatcaattcctttttcacggtatggctttgtgaattcactcgatacattatccttttcaaattcttcgatgacaattttaacagctttctcaagtatctttctatcatcaatgatagtataagatattccttgaagattatgtccactaggagcaaaatgtgcaatattcacaagatctattaatttttctcttgggacaggagtctctttatatgagcggattgaacgccttgaacgaagaaagttttctgcttcctcaggacttagttttggaaatctttttgaactgatttgattggctaatggtgtttttatattatcaattgcttcccttgggcatatagctacacaatgaccacaggaaatacactcttcaccgcaaatttctttaggtccattttcactaggttctaatacacgttctgggcactcatttacgcacaaaccacatttaatacatttatcttgatttacagttattaaattcatttttatcttctcctttaatttaaacatattcctttaagtaataagatttatttaatagtattatcgtattaaagatatctataatatgcttaacaatacaaaattaatgaaagtaaattctttttaatccattatacaattaaagaattcttttaaatagatgataaattatcataggataaataatcacagcagtattatcattattagcagtaaataattttttgggaatatgagcttgttattttttttgattatgtcttaaagtatttcacaaattactgacgagttggttgatttccatgggtaaatgcacttgaggatttagtattattttctctatttaagagaccattagtgattaaataataaacacatgctatcaaaagtacactgcaacttgcaattgtgattccaataacaccaaatgaatgatatacagaggtacttatccatgatccaagggacccacctaagtaatacccaaccatgtaaagagaatttaatctgctatgattttggaggctaagcttataaatccttccttgatttagagacatattcattcttgaaccaacatctaaagtaaaggttacgagaattataattataagtttggaccagcctacacctaagattaaaaaagaaacaaacattatagctaaagcaaaaaggttccataagcttacttttttactatttgtaagttttcccgaaaatccagcggctaacgcacctgctatacctaaaaagccaaagagtccaactattgcacttccataactataaggagaaccttctaaaataaaggataatgaaacccaaaaaatattaaaggcacaaaaggcagcagcaccaaaaactattgtttctcttaatactttttctttttttaataatggaggtaaagatagtatgatatttttatatgaactttccttttttacattatcatttgggagagaataaaataagtatactgcaaaaattaataaaactattgctgcaaattcatgaactcctctccagccaattagttggcctagaactccacctagaactctaccgagtaaaactccaagaaatactccggttaataagtgaccaacaattataccacgtttttctgacgaaatatttgaagaaacaaatgggattataagctgtgctgaaacacttgaaatccccataaaaaagcctataattactattaaattaaaggtagagactaaagtcattaaatataataatatagctgaacaaataatacttaaaatgattaatagttttctactatacctgtctcctagtggaacaatgaacaacaatcccattgtatatcctatctgtatagctgttacaagcttaccagatgctgaagcaggtataaaaaaatcattggaaatattggttaataaaacttgatcgtagtacaaattagctaccataattgcacaaataattgataaaataaataataatttgtttgaaaaacttttgttttctaaagctctattcattttcacatcttcctctctatagcttatgaagatagtgtataatgaaagtattattttaaatagaagctaagttatcatatgattaataatactatgtttagcagaccttaatcataattctaaaagtattgcaagaattttagctgcgattgtgaaatgtgcattgtgaattacaacatatataataataaagtttatatgaatagagatggggaggtaataatgatatctaaaagcaaagaacttggattatttttaaaaaagaaaagatccacattaagaccagaacaatttggactcaaatttgataaaaaaagaagggtgaaaggattaaagagagaggaagtcgctgatttagccggagtaagtattgactggtatgtgcgtattgaacaaggacaagatgttaatccatcaatagatgtgttactttccttgagtagggttttgcaattaaataatgaagaaaaaagatatttatttaatttatcagataagaaattacctgtagaagactttgcagctgttgctatttctaatacattacaaaaattcttagacaatcaaaatccaagtatagcttatgttactgatagtaaattaacaatgattggatggaatatggcggcactaaaagtttatggtaattatgaagaaatggatgaaaaagaaagaaactcagtttggagagcttttaatgatgattatctaaaagaactgttagataattgggaagggcattctaaattacgtgttgaacaattgagagcaaattacggttattatgagaatgataatacaataaatgcaattataaatgaattaaatgaaaaagatcctctatttaataaatggtggaataatcaaggtattatgggaacaccagaaggtcaaaaacttttacatcatcctttagtaggggatttatacctaagttatatttcatttaggtccacagaaatagagggagcaagtatcaccattcaaatgcctatagatgatgaaacaaagaataaattaaagcagcttatcttagaataaataatattcatcattaagcttattgctcttaatggaatcataattatgccatatttttagcataagaattcagaataatgtagcacgttatttctttcctgtaatagtcataaaagctctgtaaattataaattgatttatgaagtcaacttgtaataaaaacgaaagtgagttataattgttgataatatcaattaatttggaggcgaatatgagaaacgaagagataattagaaaagaggtaagattaattgtgagagaattagggctgcttaatcacaattgcctaaattctgaattaacactggctcaagctcatatattaaattacataaaacaaaatggaaaaactccttttaatgaattgctaataaatttaggtattgataaggcttcgttaagcaggatacttaataatttggaggctaaaaattatttggagctgaagaaatctgaagctgataaaagaatgaaagatatttgtattcttccattaggtattgaggctataaatagtggagaccatgaagcaaataaatttattaatgaaattttaaatttaggggatagtgaagatacagaaaatattgtgggagcatttagattatttcgcgttcttgcattaaaaaacaatctcaagaagaatgattctagaatattaatagaaagaatttctgaaaattatataaaagaagcaattgaattagcaacagaagtatttactaatgagcaaagcattccagaagaattggttccagtgagtgaaaatttaaaaccaatttggtggtgcgcaagagtaggagaagatattattggcgtagtatcagcatggaaagaaaaagataaatggcattggggaagatttgctgttgataaaagattgagaggcatgggaattggtcagaagcttgctatagtttcattaaaagaaatttttaattcttatactgacgaaatttacattgaagcaagagatgcaactctaaatatgttaatgaaatttgaatgcaaagtaattggagaggcagaagatttttatggtgaacctgtaactccaataatattaagtaaaaataattttatgaatagatgtaattaaagaaaagcatcaatttaatttagtagcaaaagattattttgaaggtaatattattaactatatcataaaaaaacacgagaatctaaaattgaactgccccctgtcaagtagacagatgaaaaaacaaaaaattatgaaaccaaggtctgatttcgatattcaattggagtcagaccttttaagtttttctgtagtctttttgtattatagaaaactatgtattcatcaattgcttgtctcaattcttcatatgtataaaatttttgcaaatagtacatctcacattttagagttccccaaaaaccttccattggtccgttgtcgatacatctgctgacacgtgacatgctttgagttgctttgattttatcaagtttagctttgaaagtcctattagtatactgaaatcctctgtcactatgaaacagtggctttgcagtcggattagcacttactgctaaatcaaatgtatcaaaaacaagctgattgttatttgagtgaccaacaacataagaaacaatgctcttatcagctaaatcaaatattgcgctaaggtaagcctttttaccattaagtagtttaaattcagtaacagctgttaaccatttttcatttggtttctttgcataaaattctctatttaatttgttttctgctgtaatttgtggagtactttgaatataatgctttctcttttttcttataactgatctcatgttaatagatttcattaatctataaattcgtttatgattatactgtttatccaggagtctatttatattcattgttatccgacggtatccatagataccatttacatcttcataaagtttaacaatctcttttagtattattgaattttccttatctaattcagtctctgaacggttaatccatttgtagtaagatgatcgtgcaatcccagctaaattgcatagatcagccattggatagccatttttttcatgtaattcttttatagaaatatatttatattcttggagtcttttagtgcttatcgccttctttctacttctttcaatttttttaagaaatcaatctccatctttaaacgtctattttctgcttcaataagttttaattgtgcggataatttatcagactcagtaatctcatcagtatctttacgcttaccgcgacggtctattagctcttcatatccattagctttgtattttcttacccaggtataaacttgttgataagaaacattaaatttatcagcagtagcttgataatcatcattattcgaaatgcagaatgcaacaatctcaattctttcttcataagtagtctttcttccattagtcataattctatccccttgcttattatgagatttaattgttttatgaccattatacttcttaatccaatcgctgagaacacgaggagatgaaatttcatatgtgcagcatatatttcttaaagagccttttccagctagataatctttaactgcattaagtttaagcgaatcgcaataatatttgttttttgtagaaactattaaatttgcttcaccaacatcattatatattttcaaccagtcataaaatgtggcactatgaattcccatctcatcgcatatctgtataactgctttttctcctgataggtattctttaattcctttcaatttctcttccagagaacatttcgtttttcttgacattaaaataccccctttatagaaacagttttattattttaactgtctactataaagggagcatatcaaaatttagattttcgtgttttttagttatttctaaggttattttagttttcaaaaagttttagaaaaaaatttatagatattctgttattttatgaattgagacatatatcttaattgaaaagaatagaaaaataaaaatttttaggaggagcgattaagatgaaagagagaagatatgtaagattcagagttgatatgtatgaggatacaaaatttaaaataattgatagaatgccagaaagagatgttatttattatatttggaccagaattgtaattttagctgggaaagttaatctagatggcaacttatatatgtcaaaaaacattccatatacattaaagactttagctatagaatttaatagagatgaaagtcaagtaaaactggcattagatacatttatagacttagaaatggttgaagttgttgaagaaaatgtttataaagtaaagaattttgcaaagcatcaaaatatcaaagtaaaggtaaaagatattgatgagaataaagaaaaaatgagtaaaaaggatagtaagttaaaaagcgaagaaactaaaagtgttgaaaatatctatgatgaaaaacatgatgttgaagaagagattggcaatgaaattattcaaaaacagaagcagaaagacaacaatatgtgtaatatggagaatgcaattgatactaagaataatatagaaattaaaaatgcaggaatcagcgataataagaacataataagcacggtaaaaattaatagcggactgaaagacaatatccctgtacctttagtaatgaataaaaataagaagccgaagaaagatataaggaaaaatacggatattgaggttaccgatgaggaaaatgatgatgaattcggtttttatgaaggagatagaaagcctttaggtaaaggcgaaagtgtatttagtgatttttctttttagctcaaaaagaaaaatacgacttaatatttgatttacgtgcaagggtgggaatcataactattccccacgaaattctgatttttcatggggggatttagctaatattttaagttcttttatatggtgtatttagctcggtcatttcaatgaattttgaaagtgagttagtcattaaagaatctttacgccttataaaaaatgtttttgtagtattatatttatcgggcactgggaatgattttagaagtcctttcttttcataatcttcaatagtggactttggtacaaatgatgcaccaagatcagcaataacgccttcaataatagaagttaaattattaaattccatatatcgaatattatgaatgcttttggatttgagccagttttcaagttgtgttctattaggacatcctgctgtactcatcaaaaatggttttgaatatagatcttctatattatcatatttaggacttgatattagtactaaggtttcttcgactacaagttcacttacgatattctcatcactaaaggactgagctttgacaaaagctccatctaactggaaatgttttattttataaataagttcatctgattgacttgttataagagatagatcaactttagggtaagctttatgatactgagataagatttcaggaagacgtattgcagatactgtgtgaacagcaccaattgataaacttcctgaaggatcgcaacaatcatttaaggctttatcagcttcatccaataaataaatgattttttcggcataagctaataatttctcacctgtaggagttaaaatcatacctcgctgtctataaaagagttgtgtatttaaatcggattctaattgttgaattctagctgtaacattagattgaacatatcccagagcctgcgcagcctttgttatgctgcctgcttgagcaacagctctgaaaattcttaattcactactttccattttatcaccccaatatataaatcactaaaagtgaatcttgatatcttatataatcattttacatgatatataatctcttgtaaactatgtatagaaaacaaaattaaatggcttcgatgggattaatcatataaggggttatctacactcgaaaatttattccatttataaataaggagattatatgacaaattctaaatcacacaaatggagcattctacttgttgttacattagtttcatttattacaaatttagattctactattgtaataataggtttgcctaatatgatggaaggattaaatatttcagtaactactggattgtggataattactggttacattattgcaagtacagttttaatattgcctgctggaaaatgggcagatacagttggaacaaagcgtattttcatgttaggacttataatttttgcagttggtacaatactttgtggaattgcagactcaggattaactttaaatttatataggttaattcaaggaggtggagcagcattagctatggcaactgcaactccaactataattaagacttttcatagtaatgagcttgggctagccttgagtattaatgctacttcatgggttattggagcaataattggaccagtagctggtggtgctttaattagtagctttggttggagatcaatattctttattacagtaccttttgtacttctttgcataattggagcatttttagtaatggaagagactaaacctaatattaatcaaaaaaatgactggattgggatattaacatttagcttaggtttaatattaacgatgatagtactttcagaaggacaatcattaggatgggtatcatataaaactttagggctatgtatagttacaattttattatgggttgcatttataatcacagaattacgtgtagaaaatccattatttaatttcaagctgtttttgtatagaaattattcaattggacttgtaattacattattttattgtattgcatatttttcattacctttattgttgagtatatatttgcaaagtgcattacatttgagtccaactatgtcagggctattgatgatttcactatctgtaccacaacttatattaggtccatttgcaggtaaacttgtagataatatcggatcattaaagactcttacatttggtatagtatttcttattatagggatattctttcttggaaatcttgggggagagctatcagttaaagctatagttacaccactaatattattatcaatagcaaatggcttagcttggccgtcgttagcgaaaactgtattgtcagcagtgcctaaagaacaatctggttcagcatcagggatgcattatactataatgaatgttggtaaagcattaagtcagacattagccatattaacaatagaagttattatacctgcggatgtagtctctaaggcaattataggtttaggaagcttttctaatgtaaatataagtggaaatttagttaagtctatagattccagtttcagattttttacaattttctttgtagttgcactagggttaagtttatttcttttatattctaaaagaggagagaatattaaagaaagagtcgatatggcataggttatggcacattatttagtaatttatatctttagatatcattaaataggcaaagaaaagtgattgcaaggttttaatcacttttctaatatccaagattagcattttatttgaattagacttggaatataattattaaaaagaccagctaataatagtcaagttaattttaaaaaaaatagtttttggaaaaagagtatggcaaacaaaccgtttcaaaacacgaacggttacagaaattggaataaaattaagcgactttgtttaaagagttattttctaggaacatttgcttatgtattttgggatctctttgctcaaacggagtttgatttcggagaacagcaaaaatgtagtttataattttatgcattatagcgactaaggcgattttaggctttttgcctttaaggtttatttgataataatctaataggactttatttataggaactccattacgattgttacggattgaagctagtgcaacagaatataatgctcttcgaccgattcgagttcctctttttgaaattttattatcatcgcctttaaaattacctgattgattaactgagctatcaataccaaagaaagctacaagatgtttgggcttaagaaaaccatcaatatcacctatttcagctattatagtaatagcagttaattgccctatgccaggaattgaatcaattagttcaatattagctctaatagattcaggaaaagtttcagactgtataaaattgttaattttctgtaacaatatatcaatctctgattgaatagtttttattaatgttatagagctggctattttgacggctaaaccgtctaacggtaagccaattattttagcttcattagcaaccttaaataatttggaatatgtattttccgaccagataatgccctttttagagctatcaaggaaaatcttaattatattttccttaggtgcctctaaaattgattgtggcgttggatattgacttaaaagctcaattgaacttttagatgttgaatctgaaaatatagtattatagccaggaaaaataactcttaaatcagcggataattttttcttaaaagtagagctagtatctgtaagtttgtaatactctcttacaagatttttcagaagaaaaatatcaaggctaagttgttgtgataacttaatgttttgaaattttcctattgttgcaatagataaagcgtcttttttatcatttttcacttttcttatgtcgccatttttgttagacttagtaacgagtggattgataacaaatgtgttatcgaaatatttattaagatagtggaaaagagataaatggtacacgccagtggactccatgaaaattgcagttttcatgttaaactcttcttccactttttttatttcattaactaagtggttgaagccattgagatcatgctttattttaaatgacttcttataaatatcaccattcggtgcgagtattgcagtatatgaaaaatcagctgaaacatcaattcctattacaggactataaaaaaaattagacattgtatatatctccttaaattaaattttagatatagaatagaacttccactctgtcagatagcttataaccttgtttgtgacacgggtaattcccgaagggaaacccaaccagctaaacatagaattctacctgatgaaatgatacgcttttttacgggtataggttctaaaagacctcccaggaggtttacatctatcttctattcaggagtattatactagactatataaaacttggttagattcctttaaggaatttaaataaaaaactatttaagatatgaaatgcatattccctatcggggcgtaggcaaagtaataaattagaatattaaaaataataagaggtgtaatgttcgttagaaagataaatagttttctatcaaatgttacaactagattatacaaggaggattaatatggaaaatgtaattgaaaatataaaatcaagaagaagtataagaaaatacaaagaggaacaaataaaagatgaggaactatttacaatcttagattcagcaaaacatgcaccaagtggaggtaactctcaaacatggcaatttactgtagttcaaaataaagaaattcttttagagttaaatagatatattaaagaagcttttgaaaagcttgaagttgatgaaaatacctataaaagtaaaaaagcaggtaaagttgcatcgaagaaagatgactacaatttttattacaacgctccaacattgattatagtatcgaatgagtctaactatagtaatgcaatggcagatagtgcttgtgctatagaaaatatgcttttagccgcaaattacttggaacttggagcatgttggataaatcaattaacatggtttgacaatgatgaaaatgtaagaaagttacttacacgcttaggaatttcagaaaaacataaggtttgtgggtctatttgtattggttatatagatggtattaagccagagaaaaaagtattgaaggaaaatgcagtgacaattataagataatagggaattatagttatattgacttataaaatatcatcaaatcaattaatagttggtttattaatttgaactttacattaacttcatatcacccactaaaatctaaagtttagattttagtgggtgatttttttattattatgcttttcctttagagtatgttttttatgttcaatgaaagctaattgtctttcaatctcttccttttttgctaaaagtatttcctcttgttctaaaacaatggaataacgttctttaagtcccattttatcttcattagatagatcaatataatggcgaattagatcaattcccattcctgtacttcgcatacattgaatcattcgtaatcgcataatttgatcatcagaaaataaacgaatattattcttatctcgagctattccttggagtaatccgatatcttcataataacgaatagtaggtttagatagtttagttattttagaaacttcattaattgtatatttggggtcggatccataaataaaattttccataaaaaatctcctaaaatttcttgacttaaagttacttgaatgtattaaagtgattatagcatatagaaatatgaaattcaatttggaggcaatggaatgaagaataatgaaaagattaaagtaattgacaaaatttacattaatggagaatttataaaacctaatggaacagaatcaatggatattataaatccttcaacaaaagaaataattggacgtgtaatcttaggaaatgaggttgatacacaaaaggctattgcagctgctgaagaagcatttaaaacattctccaaaactacattagaagagagaagtgatatgcttaaaaggttatatgatgctgtaatctcgagggctgatgagttaactcaagcatgcgtagaagaatatggtgcggcagttaaggcagcagcaggcagaactcaacttactgctaatagttttctctgggctaaggaagtgatggaagagtttgagttcactaagtatattggtaaagccaaggttgtccttgaacctgtaggagtgattgctttgattaccccttggaacgcaaacaattctcagatagctataaaagtggctacagctatttcagcaggatgtacagtagttataaaacctagtgaattttgcgctatccaaactcaaattttggctgaatgtttccatgaagcaggaataccatcaggtgtaattaatatagttaatggcctaggaagttcggtcggtgctgaattaactcgtaatccagatgttgcaatgatttcttttactggctctactaaaactgctaagattattcatcatggtgctgttgatacaatgaaaagagtaattcttgaattgggaggaaaatcaccaaatataattcttgatgacgctgattttacaaaagctattccacgtgcaattatgagctgcttcggaaataatggacaaatgtgcattgctggaagccgactattggttccagaataccgtcttagtgaagttaaagaacttattaaaaaagctgttgaaaataccaaggtaggatatccatgggaagaggatacgtttatagggcctatgataaatgaaaatcactataataatgttcaacgatacattaagattggtatagaagaaggtgctgaactgatagttggaggagaagggcatccagaaggattggagaatggtaattttgtaaagccaacagtttttgcaaatgtaactagagatatgactattgctagagaagaaatatttggcccagttttatctattttgacttatagaaccgaagaagaagccgtagaaattgcaaatgacacagtatatggtttaggggcatatataagttcttctaatatagaaaaggcgaatcaaattgcttctcaaatcgctgcaggaacaatttatataaatgatgttatgcttgagatgaaagcaccatttggtggatttaaacagtctggaattggtagagaatgcggcatatacggacttcaagaacatctagaacctaaaaccataatagtttccaaggagaatattaaagaataaatctatatttttaatagttgcaatatatagtataatagttgttagaaatcaggaaagaaattaatatttatatttaataatttctaataaatgataggtgaggaacgtaaagagatgacaatggaattagagaaatactataataaattttgtgaagataaaagattaactagaaaatatgcacaagttgagtttttaacttctatgaaatatattcatgagtatctagaaaagaataatggttccaaaattttagatgttggtgctggaacaggaagatactctgtggagctagcaaatgaggggtatgatgttacagcaattgagcttgtaaagcataatctaggtattttgaaatcaaaaggaagttcagtaaaagcatatcaagggacagcattagatttatcaagatttgaagaaaatacatttgatatgacattggtatttggaccgatgtatcacttatacaattttcaggataaagcaaaagccttacaagaggcgaagagagtaacaaaaattggaggagttatcttagtagcttattgcatgaatgaatatagcgtaataacatatggttttaaggaaaataatattcgttcatctattgaaaatggaaagcttactgatgattttcatgttatatctgaaccaaaagatttatatgattatgtaaggattgaagatatcaataagttaaatgaagaagtaagactaaaaaggataaaattaatctcagcagatgggccagcgaattacatgagatctgttttaaatgctatggatgaagagacatttaagctttttattaactatcatttttctacatgtgaaagaccagagttgcttggagcaagtgcacatacattagacattttaataaaggaataggaaaagagagtaagagagctaaattttaattattaataagaaataaatatagcacctttttcaaatatgaaaggtataatataaaataaattcttaacaaagtgtttgttttatattatacttttttgtctttaaataaaaaaattttataatattatacaggaacaccatgtgatttcaatatttaccaataattatatggataattattattgttaaataattattttatattgaatacaattaatttagtgctataataaaattataaaagatcgattatatgaggaaaaaaggtgtttattatgaatgttaaattagaaaatagatatagattatttattaatggagaatggagagatgcttcagatggaactacaataaagacttataatccagctaatggggaatttttagctgagattgcagatgctacagaaaaagatgtagatgatgctgttaattctgcaagacaagcctttgctacatggggcaaaactactgttgtagaaagagcaaatatattaaataaaattgctgatattattgaagaaaacgcagaatacttagctacagtagaaactttagataatggaaaaccaattagagagacaacaggagcagatattccattagcagcagatcactttagatattttgcaggtgttattcgtgctgatgagggttctgcaacaatgatagatgaaaatactttaaatttaatattaagtgagccaattggtgttgtagggcaaatagttccttggaattttccattcttaatggcggcttggaagttagctccagtgttagcagctggggatgtttcagtatttaagccatcaagtactacttcattaagcgtattagagcttatgaaactaatacaaaatattgttcctagtggtgtaattaatgttattacaggaaaaggatcaaagagcggtgaatatctgcaaaatcatgaaggacttgataaattagcatttacaggatctacagaagttggaagacaaattggacttgctgcggctaaacgtattattcctgcaactttagagcttggaggaaagtcagctaatattttctttagtgatgcaaatatgaacattgcattagaaggtattcaattgggaattttatttaaccaaggacaagtttgttctgcaggttctagaatatttgtacaagaagatttttatgatgaatttatggaaaaagcaattgctgcttttgaaaaagtcaaagttggaaacccattagatcctaatactcaaatgggagcgcaagttagtgaatctcaacttaaaaaaattcttaaatatatagaaataggtaaaaaagaaggcgcaaaagtagcgacaggaggggaaagattcattgagggtgatgctaagaatggatactttatgaaacctactttacttacagatgttactaatgatatgagaatagctagagaagaaatatttgggccagttggagttgtaattaaatttaagacagaagaagaagtcattgctatggcaaatgatagtgaatatggtttaggtggtggagtatttactactaacttaaatcgtgctataagagttgctaaagaaataaggactggacgtatatgggttaacacttataatactttcccagcaggtgcaacatttggtggatacaaagaatctggtataggcagggaaactcacaaagttatattagaagcgtatactcaaaagaaaaatatcatagttaatttatcagaaactcctggtggaatgtatataaagtaatgaatattgaatcatattatatgtattagaatcaagcctctatattttaggtttaatcaggtatataacttcccgaattttaaatataaactcattactgaattatatatagattataatagccataaagacccttaatcaggatctttatggctatttaaatgagaaaagtattatttgcagtaagttaaagcaaagcattaacgccatttactttagcttgttcatcatcatctataggaattataatacatttctttccgtctattatttgtgattttatttgagatactttttgaggttttacattaagtacaatatcataatttggagcatcgctaatctcagtttctatttcagtgttttcagtattatttgcatcagatgctgtttctgaatcaagattttcatctaaattagagtcagaagccacttctaagatggtatcagattctgtctttaaagcagaattaggctctgactctaagatcttattcaaagctgattcagtttctgattctaaagcagcttctttctctgaatctgctaaagcatccagttttgtcttttcaagtctttcttctaatatgcgtactttcttttcaagtttttcttccttttttctttgttcatttgctgcaagtgcttttttatcaattaaattttctgctacaggcggagtatctccaaatgcttctgtatatgatttttcaatctttgcagtgatctcttcaggaactccactttcgattaaaatatcttgaatattatcattactcaaaactataggctcagcatttttgccgttaacagtagtatgatcatctactatagtattgagagtttcttgaatttccataaataaatgctctgatttttcatcatcacttccagcagctttacgaattatattttggaatgtttctttttgctcagtagctgtttgttttgaactacaacctaaagcttcctccataaattcgggatgaggatcttttgcatcttttgtgtaatacataatagaatgaatatcagtactacgatctataaatgctggaaatacaaatccaaggtctggtggaccaactacccaatctctaatacgagctccaattcgattttcatcttcaagatatccaagagctggttttgaaagtgatactggacagattgcacataatatatattcatatacctcttcagattcatctaattttgagttatccgtagtttttgtcataacatcataggcatcgtgaaaaacgagtattagaaagttaccagtatattcataactatttataatcattttataaaagctatcgagcatagaatcatcttttaatttacttttttttagctccattaaggaaagctgtctgccacctatgccttcttcatcaagaggaaagttaagttcaagaatgttatttccaactgttccagatagtgttttcttggcaatttctaaatatttaaagaattcttcctctcttagatttaaaaaagtttctttaaattttaatacaatatctttttgaccatctacataacaaccacacattttagtaaatgtacagtcatctttttttaaacgtctttttaattctaatatatcttttttgttcataaatctccctctcatttcgccgaattcttattagatacatgaaataacatgtccaaatttgctatgaatattttatacttggactctaaaacattctcttaagaaactcgtaatttcttatagattttatattttaagagtctggactctatatataaaatagactggctattgcctgctattttgaatacgctttagcacatgccaaaaatacttcacataatatagtatagtggtgaattgatagctctgcaagatattaagtgaagtttaaagccatattttgtaagaagatttaagcgttcattgtttagtaaacgtataatataaaaacagctaattttatatagaaattaaaaatataaaaaaatattatacgaagatatagacaattaaatccaattatgataagatttaattacttaaacgtttactgaaaaagaggaatatgttatgaatagtaatattaaaagacccacaattaaagatgtcgctaagaaatccaatgtttctgttgccacagtttctaggataataaataatctagatggttattcagaagagactagaaaaaaagtaattgaagctatggatgaacttggttatcaaagaaatgcaattgcgagaaatctcaaggttaaagaaacacgaactattggagtgttacgtcctaagataagcactacatattatgtagaaattttaaatggaatagaagattttgcgcaacgcaataattacagcgttataatctgtaatggtggagataagtgggagcgaatgtcagaatatcttcaggtattatctgaaagacaggtagatggattaattgtttgtagcatacctccagatgatactttatgcaaaagaataatagactcacatattccaacagttcttgtttcaggattatcgtacaagtattcattaccttatgttaaggttgatgattatcaagctgcttattcagcaacatcatatttaattgaaaatggccataaagagatagcaattatatctggaccgactgaagaccctatagcaggagtgccacgtttaaatggatttttgcaagcattaagagataataacatatccataaagaaaaatcttattaaagaaaaagggtttggatttatagatggtgttgaaggaatgaatgaacttctagagacaggtgagaaatttacagctgtttttgcggcatctgatgattgtgctgttggagcattatcagtagcacataagaatggtttaaaagtaccagatgatctatctatagtaggttatgataacacaaatatagctgagatgtcatatccacctttaacaacagtagcgcaacctttatatgatatggggaaaaagtctgttgaaatgttaataaaaagaatatcatacaacgaaaaagttgaaagcataataatgccatttgaaattatagaaagagagacagttaaaaaaattaaagatatatagactgcactaataaatctacatttaaagatataagatattaaatactcagttatgatttaaatgtagaaagttaatagtaatatataaattattataggaatataagatattcaatgattatttataaaatgatatgaagctatattacaagtttctatatacaattctaagtttaaaactttgtaatataatttcatataagatttgagaaaaatattacgtaaatttttatagtttacgtaaacgattaagtattaacaaacaaaaaaagatattaaaatgtacttcttaaggctgatgtgcctaaaatagtatagttaatataatattaaatctacgtaatcgtatactgaaattacaaagtagggggaagagaaatgaataaaaaattaaaattactaatgtcaattactattagtgcagtaattggaacttcattattagcaggatgtggttctaagggaggcagcacagaaaatggaaaagtaaaattagagttattttcaactaaggcagaaaataaaacaatattacaatcattagcaaatgaatttcaagaaaagaatcctaatattgaaatttcaattaattcacctgcaaatgctggtactgttttaaaaacaagacttgctaaaaatgatatgccagatttagtagctttaggtgcagatgtaaactatggtgcactagtagatgcaaatgcccttgttgatcttactaatgatggcattattgaaaacatacaaaaaccatatttagatatgcttcatggcatagcaagtaatgataatggaaagatatatggagttccatatgctactaatgctgatggcgttctatacaataaagatatattttcaaagctaggattgcaaattcctaaaacatgggatgaatttatggctgtatcgaaaaagattaaagatgcaggtcaattaccactttatttgacacttaaagatgcgtggactggaatgtgtttctggaatgtcatagctagtgacttggagcctagtaatttcttagctgataaaaaagcaggaaaaacaacttttgaagctacacatggagaaatagtggacaaaatggagaatataggaactcttgggcaagaagatattttaggagtatcatacaatgatggtaatgcagcctttgcacaaggtaaatcagcaatgtatttacaaggtaactgggctattagtgaaataaaaaaagcaaatcctaatataaatctaggtatgttcccattacctgcaagtaatgatccatctaaaaataatatagtatctggtatagatgtgttatttggaataacaagtaagtcaaaacattctgatgaagcaaaaaaattcatagaatttatgactgaaaaggagaatgctcaaaaatatataaaagatcaatttgcattttctgcagttaaagatgttacacaagatgatcaaagtgtaacagatgtacaagaaagctttaaaaatggaaaaattggtgttttccctgatcactactatccaagctcatttgatgcagcaagtttagttcaagggttctatagtaaaaaagataaggcagaattcttaaaacaacttgatactgaatacgataaagctaatagcaagcaataaataagagaaaataaaaggtataaggatgtcctaaaagatggctgtagctcgatatttatttataaacatgaaaaataatatttttaggaaaatagactgattttaggacaacctatgttatatgttaataatatttatttgtcaaatgaaaaaataatagggggctgaaggttttgaagaagaaaaaagctttttatattatgactataccagcagttttgttattctttatatttcatacattatctcttttagaaggtgtattttatagttttaccaattcaaaaggatatggtgattggagttttgttggattaaaaaactatattgcagtgtttcaagatagtaatgttatgcatgcgtacatttttactttcaaatttgcaattataactacaattatagtaaacatattaagtcttttaattgctgtaggcttaaactcaaaaatcaaatttcaaaataccttaaagtcaatatattttattcctaatatattaggaactttaatagtggcatttatattcaattttgtatttgctcatgttataccaaacattggagagactatgaacatttctatgcttagtaaaaacatattaggtgatgaaaagcttgcatggcttggaatagtgtttgtagcagcatggcaatcaatagcctttaatacaataatatatttatctggacttcagacaattgatactgatgtttacgaagcctgtgatattgatggtgctggttcatggcaaagatttaaaagcataacatttccattaatagcaccatttttcacaattaacatggttttatgtatgaaaggatttttaatggtatttgatcaggttgtagctatgacaggaggaggacctggaactgttactcaatcaatatcttatgtaatttataacggaggatttaaccaaggaagttttgcatatcaatctgcaaatgctgttatttacttcatcgtaattgtagcaatatcattatttcagcttagagtccttgaaaagagggaggaaaaagtactatgaggagaaacaaaaccaattggatagtaactacgcttatgatagcaggagctttggtggctataatatttccattgtatctaacaatattaatagctgtaaaatctccacaagatatggtaccaagtgctttatcatttccaaaggcattgcgttttgaaaattttactgaagccattgaaatgacaaatttctttgatgctctaaaaaacagtttaacaataacaatttcggtattaattcttacaatactctcaaattctttggtttcatatgccatagctagaaatagaaagaaaaagttttttaatgcattatactattactttttaagtgctatgtttgtaccatttccaataattatgctgcctcttgtaaaacaagtaaatatattaaacatggataatataattggaataatatgtttatacgttgtatttggactaccttttaatatatttttatattcaggttatattaaatcaattccagtttcacttgaagaagcagcaacaatagatggtgcttctacatttcaagtattttggagaataattttccctttactaaaacctattaatgctacggttgcaattactacttgtttgtggacatggaatgatttcatgttgccacttattatcttaggtaagccagaaatggctacattgcctttagttcaatacgtattccagtctcaatttactacaaattataatctggcttttgcgtcatacttgctagcattattaccaatgtttattgtatacatctttgcgcaaaaatggataagaaatggtattgtcactggagctgttaaataataaaaatgcatttaaacgaaataaaataagtaatattaaaaggagaataagtcatggataaaaaatggtggaaagaaagcgttgtttatcaggtatatcctaggagttttaatgattctaatggagatggaattggagatttaagaggaataatagagaagttagattacttgaaagaattggggatagatgtaatatggttatctccagtatataaatcaccaaacgatgataatggatatgatataagcgattatgaagatataatggatgaatttggaacaatggaagatatggatgatcttattgaggaaggaaataaaagaggaataaaaattcttatggatttagttgtaaaccatacttctgacgaacataaatggttcatcgaagctaagaaatcaaaagataatccttatagagattattatatatggagagatccagtaaatggagaagaaccaaatgatttaagatcaacatttagcggtagtgcatggcaatatgatgaaactacagggcagtattatttacatttatttagtaaaaaacagccagatttgaactgggaaaatgaagaggtgcgcaatagaatttataaaatgatgaatttttggattgataaaggtattggcggatttagaatggatgtaattgaacttataggaaagattccagataaaaaagttacgcataatggtccaaaactccatgaatatattagagaaatgaataagaagacattcggaggcaaagatttactaacagttggagagacttggggatgtactacagaaatagctaagaaatattcaaatccagatgatagtgaacttagcatgatatttcaatttgagcacattttattagatcaacaaccaggtaaagaaaaatgggatttaaagccgttagaattattagatttaaagaaggcattatctagatggcaagtagagctagaaggcacaggttggaatagtttattctggaataatcatgacgtaccaagaatagtttcaaggtggggaaatgataaagaatatagggtagaaagtgcgaaaatgcttgctacattattacatggaatgaaggggactccatatatatatcaaggtgaagagcttggtatgacaaatgtaagatttgaatcattagaggattataaggatatagaaactctaaacatgtataatgaaagaaaaaaacaaggttatactcatgaggagataatgttatctatatatacaaaaggcagagataatgcgcgtaccccaatgcaatggaatgatagtcaaaatgcaggctttacaagtggacagtcttggctaaaagtaaatcctaattacaaagaaataaatgctgagtctcaattaaaagatgaaaactctatattcaattattataaaaaactaataaaaataagaaaatccaatccagtagttgtatacggaaaatatgaattgatgttagaagaaaacaaagaaatatttgcatatacaagaactttagaaaatgaaatgttactagttatatgtaactttacaggaaatgagacagagtttgtacttgaaagaaaatttgaatttaaatctaaagaacttttaatttcaaattataatgttaatgaaaatgattcgattgagagtatagaacttaagccatatgaatctagaatttataagtttatattatagaaatacttttatatagtggatacagcactatctttctttagcttatctggaaccatattatatttatgtaatagaaagcccattgatttcagtgggctttcgtgttgcttaaaggtaaatttgtacagaaaattgagttgaaatatcaagatgaatatagaagtgtctgaaagagtctaagtagaaaatatgcatttagtattccttactaatgtaacttcaagagtacactacgtctgatttaacaccgtagaaattgttttatctttttttcagtatctgacccgggcaatgctgtaagaattgtcatttttaaatttctatctgataaaaccatatagctggtatactcaaagttctgtcagaggcaaaagagatgggagaatggctattgctgatagtacaagtcaagtataatttataatgtagaaacttaattgcaaaatatatatagttaaattgatgaattaagtgggatcagataaaataaggtatatgaagtgtttttaaagatatatatgaaaaagtttaggaggtatcattttggaaaaagaagaagttgaattattgccagcaggactaataacatgtttattagatgataaagaagtacgtataataaaaatatctcctgaaaaattgacagtgcgtgtggctgacgaaatagaaaagataagcagtataaaagttgcatttcataagttcgatgaaaacagatatgaagaggtaataatacaagattataatatagtggaaaaaagaaaagaagattttagtttaacatatattttcagcattgaatcacgaaaatactcacataatgtaagaagtgcttttaaaaagtattcaaattatattatgttaaaagcttttggtgatggcaatgaattttcaaaggaaatggttaattatccggcaaagctagatgaggagtttcataaggattatttagaacagaaagaagagtggctgttaggcgtaaattatgggcattgggatgaagatattattgattcagtggagatagctatttctttagataatgatatattatataaaaagtttatggataatgatatccaaacatttaagatggattacttaaatgaaaattttatagaggggcatgagttatttaagaaagatattaacaggatttatattggaaatgaattttgtcataacttatttccagaaataaaattgttaaaaggtatgatgcagaaagccaaagaagagagccttgagataacgttatgttttacatatatgagagagtgttatatagaaaaaacaaaagatataatagaggcagtatataattggtgtaatgaaaataatactaagatggaaattattataaatgattttggaatgctaaaattacttaaagataagatagatattttcaagctgtcactaggcgttttattaaataagagaaaaaaagatccaagatatatttacaaaaaagggtacttagaaaataaagagcttatagcaacaaacagtcttaatagttcaatttttacgaagtttttgaaagaatgtaaaatagaacgatatgaatatgaaaattgtggttataaaatttctattgcagatgggcaccatagtatgcatattcctttctatcaaacaaatacatctcaatattgtccactatatgcaatgtgtacaactatggatagaggaaatcagaaacttgttactgactgcccaaagtattgtagcgattatgtattttcttatccaaagcacttaaaaatggttggaagatataattcgctattcacttttgatgatactttgcttaaaaatccaaaagaattagagtattacataaatagcggaatcgatagaattgttttaaattttctatagatatcgaaatatgagcttatacttatgtagagtttaacggtgatatgtaactatttcacaaacgcacatataggtttatctatgaaggaggaaaacataatgaagatagtagcaggaatgggatgtattgatgattatataaaactagtaaaggctggagcagatgaagtgttttgtggatatgttccttatgaatggaataaaaaatatggtagtttatttcctttaaataggagagaagtactttattataacattcaaataaattcacttgaggacatgagaatactaaagaaaatggttgatttttataaagtgccagtaaatataacttttaattatttatactatcttgaagaacaatatgaaatgatagctaacataataaaagatttgataagtattggctttaatgattttattgtagcagatattgcgcttatattatatttaaaggaaaggaatataaagtgctcaatacatttaagtggagaatgtgctgaactaaaccggttttctatggaatttttcaataaactaaatatatcacgatacatatttcataggaaaaatacaatcgaagatatgaaatcatgtataagaagcaataaggtagaaaatcttgaatatgaagcatttattttaaatgaaagatgccattatactggtgctttttgcagttccctacattgtgatgaaatgatacatttgtgtaaagttccatatgaactattaagaatagataaaaatgagagtagtttttgcgaagttgataagagaattgagtcttattacaaggatataaatgacaaggataaggaagaactctatatagaaaatcaatctgatccagaaaatgaatatggaagtgaaagcgaagagggaatggaagtttcatatttcattggagaaactggatgtggattatgttctctaaaaaagttaaagaaagctggcattactcatttaaaggtagtcggaagaggaaattctattgagaatatggaaaaagatataaaaagtctaaaaaaggccatagctatattagataatactgaaataagtgaaacttatgaagaatatataaaaaataagttacttgatggcaaatgcagcggacaatgttattattaaaaagtaggactcaccatataaaggtaagtccttttataagttatcacataatattaatatatatatatttgataaataattcttcatcataattctaaaagtattgcaagaattttatctgtaattgtgaattgagaagtatgcattgttaattgcaacatatatattaatgcaggattatttctcaggtgaataaaagggaaattctaataaataaaatttaaatatgcaaaatagaactttatgcttttttgctaatcttgtgtataataagcgcaaggatttgagttattataccaaaagtacataccccataccatccaaagtgagaatagctataggaacctaaaaacgatccaaacgccccaccaagaaaaaagctaaccatataaatagtattaagtctattacgtgtttcttcatttaaagaatgtactcttgcctgattagatacattacaagattgtactcctaaatctagaagaattactcctaaaactaatcctaaaattttgaatccgaataggaaaaataataaataggaaactataaccacgactatacatatgcctatagcaaatcttgaacctcttttatcagctacttttccaaccagtggagcagcaagagcaccgctaacacctactaacccaagtaagccagctgcttcagctcccatattgtaatgagaactttcaagtaaaaatataagggttgtccaaaaggcactgaaagctgaaaacattaatgcaccattaagagaggattctcttaagatcggttctgtttttattaagtgtatcatcgattttaataactcagaatatttaatgtcggaaatagggttgcataatggtattaattttctaagaataagcatgagagtaaacatcataattgctgcaataagataaactattctccagccaaggtagcttcctaatatgccactaactgtacgagaaagtaatattccaattaataaaccgctcattattgtgccaatagtttgtcctctttgttgcggatttgagagctgtgctgccaaaggaataataagttgagggattatagaagtaaacccaacggcaaaagaagagatcgtaagaatatatatatttgaagagaaaaacatactcataagtgaaattactgagaataaaagcattattactattaagtttctcttttcttttatatctcctaaaggcaatataaatatcattccgattgcataacctatttgtgtgagcatagctgcaaaacctatacttaattggtcaacatgaaaagtttttgctatgtctcctaaaagcggttgaatgtaatatagatttgctactgtaagtccacaagctattgacataactaagattagtaatttagttaatataggtctagtattggtattatctattgatgaatttgtttttaatacagcattagttgattgatacatttataaatcacttccttaaaattatataatacatataattgagcaaaggtctaatttacaagtaataaaaatttcttataaatatcaatgctacaattatatgagggttagattagataaaagtttatcgaataaaattagtaaaaatcttttcttctctttcaggagtttttataactccctgaccattttcgataagcttcataagccaggccatgttcttgcctaggattctcataatttgttgtccttcttcatcttgcattacttcacctggggctcttccgttaattacattccaatagtttgaagtaggaataatcatttcggaatgattaatataattgttcaattgatcgaaggttggaattccacctgcacgtcttactgcgactactgcaatgcctactttaagtcttaacatactatcagtagcttcggctacacgaaaagccctatctaaaaatgatttcattgttccggcaattgctgaatagtgtactggtgaccctaaaattatgccatcagcatctttcattttttcaatccactcgttaactggatcggtagcaatggcacatttaccatttttattttttgtgcaatatccgcaagcaatgcaacctcttatagacttgttccccacatgaattatttctgtttctattccttccttttctagttcatcagtaactaattttattccatgataagtattaccttctttatttggacttccgttaaatgctacaactttcatttatttttcctcctcataatacatataatttaatgaaatttattaagatctattacttatttgtttttaattgaatattaataaatattattcccgccatatatcttaaaaattcttaataaaataataaggcatttgataaaactgaacgtttagtttataaatatatattatactaaacgttcagtattgtaaatagttttttgaagaaataaaaaaattatttttaagtctattaaaaaggcataagaggtataatatcactaacaattaagtcaaatgtttaaaagagataaattagaattgataagtataatatatatagtataatagacgtatagtttactaagtataggctataagttaattacaatggaggtaactacatatggagaaaaagttaggacgccctcgtagcgagaaaactaaaaatgcaattctttccgctgcctatgatttattgcttgaaagtggttttggatctgttacaattgaaaagattgctgagaaagctggagttagtaaagctactatttataaatggtggtccaataaggcagctgttgttatggatgctttttttgacgcagctgttgtgagactcccagttccggatacaggatcaactatggatgatataataattcaagtaaataacttagcaaattttctaactagtcgcgaggggaaggtaattaatgagataatagcagaaggacaatctgatcaaaaattagctgaaacataccgaacagtatattttaagcctcgtagacttgattcaagatatattctagaacgtggtatttcgaggggagaactaaaagaggatttagatatagaattagttatggatttagtttttggtccattattttatagattattaataacaggtgatatagtagatgagaattttataaggaatatggtcacttgcgcctttaatggcataactaaaagttaatattgagggtaattcaattaagaaaattctaatgatacagaaattattgatactttagtcggagattagatgtttcttactaaaatcatagaaatataacatatagattttgttgaaagttcatattaatttacttagaataaatctaataaattaatatagaatatatagtggaaagctaatgcatagcttgtggtgagttcatctatttgatataatcataagagtaaaaaataacatatagtcagttcgaaagcctcctgacttaaaataaaactacggttaaataattgataataataaagattaaattaatttgtgttaatggaatctttaatttttgttgagtatatttatcgtaggatttttcctgcgatttttttattttctaggaatctatattgaagcaaaatttgtggagattttgttctttgagagtacggaaattatggggaaggttgattaagcaggttaactttaaaaatattattagtaaaatggaggagtttatatgaataataataatacagtgaaaaggctagttaaaacagctatcatagccgcactttacgcagttataacgcttgttctggcaccaataagctatggtcccatacaatttagagtctcagagataatggtattactggcattttttgatccgttttatattgtaggtcttactcttggatgttttatagcaaatattcttggacctaatggtttagcagatataatatttggtactttagcaacatttattagtgtttatgctgtctcaattacacaaaggtttgtaaagaataagaaaacatcattaattatagcatcgctttggcctaccatctttaatggagtaataattggatggatgcttaactatatttatcaatttccacttgtactatcaattggggaagttgcaattggcgagtttgttgttgttacaatagttggtgtaccaattgttaggctattacaaaataaatatagtagatttcctttattttgtaagaattaagaatgaatactttttacaaaatagtatatatcaaaagatattgcagtagagtttttattgcaatatctttttttacaaacagtaattttgaaaacgaactactagaacaaatagcatagatattggagaagataaataaaagtaaaagcactttattaataataacaaaaagtcaataataaacataaatatggcatatgtagaatatttatgaatagtaatttaaatggatttatagattaatctgtactgctatatatgaattattggagaaattataattaattttcaagtttgacatgaatatccctctactctataatttagttacacaatttttaaaaacaaggaagcgaaaattactatgataagtgttatcgaaactgcaattataactataataatatcatttatatctggattactgttagagtattataaaaatctggctcctaaaatattatgcaatataggagaaggtgtaccactagaattaaacaacaaaaaaatatgtgcatatgttcttacggtaagaaacatatcaaataaaacaattcataagttaaccttaaatatacaagggttacaaaatgatttgaaaattggagatgctcaaataacgaaaggtttgaaatttgattcttcaatagaagataacattttagatgtatatatacctttcttaagtaaagatgatgaattttcagctacattgtatgtggaaagtaagtatggagaatataaaaagcctgttgtaacaattagatcacctgaaaattttaaagagatacaatcaattgagcaaggaggaataatatcctcattacttaacatgcctaaaaatataaagaatttaatttgtaatataacgaaggatgataaagcttcaacttctaatagagggcgcagatctacagtaaataaaggacaaactgctaagaaaataggtggtaaagaaaatagtacgagatttggtagagataaaaactcatataacaatagaaaggcgctaatagccattatatcgctcattttgattataagcattggaggattaggcgcattatattttcaggagatgtccactaatgcaaaaacttcagatgaaaaaactgaagttcagaagcaatcaacgagtgaatcgcagtcagaaggtgaacagactaagaatgcgaatgaaaaaataccgacaagtggaaaaaataaaaattctccagtaaaagtttcaggtaatgaagcaaataaagattcaggcgcaaaaacatcacaaaatggagatactggaacaccagatacaaagacacaagcaggtggagcatcgggaaattcagatataaaaacatcaacagatgcaaatagcccaaataatacagatacaaaagcaccaacaattggtggaacaaatggaagcacaaacttaaagtcgccatcaggaacatcaagtgaaaatacggatgcaaaggcatcaacaagtggaacaaatgggaatacagatcagaaaacttctacagatggaactactaaaaatgtggatacaaagtcatcgacaggtgggacaactgcgaattcaggaaattaatgtgaaatgtactttatcagcagttaatagaacaataattattaaaaaattaacctcttcactattatacatgaggatataatagtgaaggggattttttatattatatttttagagttttattttatggtaaagtaagagcatcttatttataaaagcgttatatttaaaggaaatagtttaaagtgagaaataaatgttaatattttatataaacagtatactaaggataaggaattaaactataatggttaatgttaagttaatattataaaaaactggagatatatatgaataaaatagataccttaaaaatttcaaactatgataagtttaagtgcacagctgataagtgtaaattcacatgttgtgaaggatgggatattagtgtagatgacaatacatatgataattggaaaaatgacaaatctaataatattttaaataatgtaaaaataaaaagatatgaaggtaaagatgagtattttataaataagaaaacaaatgaagtatgtccgcttttagacagccatggattatgcaatatagtaaaagatcatggggaaaattatttatctttaacatgccaaatgtttcctagaatagagaatatttttgaggatagaagagagctttcattatcatgttcctgtccagaagtattagagtttataggtagtgagactggcaaaataaatatgacttcagaaagtcatatttatttagaaagtaatgcgttagaaattaaagttagagaaaccatcataaacataatgcagcaagaaaaatttttactagaagataaacttattattagctttcaaatgctatcgactattttagaaaatgacgatcttggagaagatgccttattaaaggaattggaaaagtataaggataggaattatgtaaaagagcttattgacatgtataagggaataaagataaatacaaatgactcagttgaggaagtcaataatctatttttagatatcatagagaattataaggaagtttctatttttaatattcttttaaaagatattgctaatttcgcggaaaatgctaaaattaaaaaactttcatctaaatggaatgattataaaagtttgttcgagcaatataacgactttgttgaaaattgcattatatctaaaatttttagcaattgtatcagtgatgatatagaagagatgattatttcattccaaatgattatattagagtatttattgttaaggtattccttattcttaaaatattgcatggaaaataaaatagatgaggaagacataaagaattacactgtagctttttcaagaataataggtaataatactgatgctatgatagaattcattagggatggttttgaagatgatattttagagattggatatttgtgttttataactttagtttaatattacaagaaatataaagatcagtatttcctatactgatatcattcttatttatataccacattagatttatatttaatgtgttttataattaaacttataatcttataatcacaaaagtctaaattagtataagattcaaagtcgttactgaatttatgaaattctgagaatggattattttgggagacgtaataatccagtgtcaatttggtaacacgtttataatgacatatatgccataattttagaattaggtggcattatgttttattttaaatataaaattgtagaatattacaagatatatttagtataatggagtgtatgaggtgatgtttttgaagctaaacatttttttttgcttgatactattattatctgcgctaacattaatgtatataggatattcttcatggaaaagagataaatcatatgtttcaatatctttgattcctgtatcaatttatgcattaggatatggatttgaaatattatgtacaagcatcgaaggagtagaattctggataaaaatagaatacttaggtattccatttatagctgtgttttggttaatgctcgcacttaactttacaggatataaagataaatttaaaaagaatattttagcattactatatataataccttcaattacatttattctgaattgtacgaatgattttcatcatctattctataaagaactacatatgaatgatactggagtttttccaatagcaaagataatagaagggccttggtattggatacatattgcttatacatacattctaatgattgcaggggtagtgtttttggtagcagcatatttaaaatcagctgcaattattagaaaacaaattttacttataatagttgcatgggtaattccatggggggcgaatatcatttatatattgaagctgttaccatttactcttgatttatctccatttacgctttctttttcgggaataatttatagttttgctatattaaaattcaaatttttggagcttaccccaatagcgttaaacaaggtattttccagtatgctagaaggtgttataatattggattccgaaaataatatagtaaattttaatgattcagcaaaaaatattattttagagttaagagacataggtaaaggagagcataagattgatgaagtatttaggaaatataaaacattattaaatgttataaagaatggttccagtaatgaaagcttgattagtataagttatgaagaacagctaaaatattataagataaatattaataatatatctgagaataatggtaagatagttggtaaaatactaattttaacagatattactgagattgaagtgcaaagaaaaaaagtatatgataatgcgaaatttcttcaaacacttattgatgctattcctaatcctatatattctaaggatgaatttggagtatataatcattgcaatgcagcatttacagaatttttaggaatgagtaaagaagaatttttgggaagtaccgtttataatattttcgaaaaggaactagctgaagtttatagtaattcagataagaatataatgagtcaaaagcaatcccaagcctatgaagaaaggcttacacataaagatggcacatatcatgatgtaatctttaataaatcagttgttgtaaatgaagatgataatgttaaaggattagttggcgttataatagacactactgaacaaaaaaagagcaaagaaaagataagtaaattattaaaattaaaagaatcaatgctaaaaatagggtactcgattaacgagatatctaatattaataatttactgcaattaatattggacgaagtcattaattgtatagatagcagaagttgtggatctgtgctgcttttagataaagagaaaagtttaaaaatagctgtggctaaaggttataacttagaggatattaaaacatttgaattaaagtacgaagagcactttgcatgggctaatcagagaaataatgtagatacaacaactattttcaatgatattcataaaatagaaaatataaaaatgctagatacggcaaagggaatgaaaataaagtctattattagttcacctattattatagatagtgaattatatggatttttgaatattgatagtatctacaataattgttttaatgaaggtgatttggaattaatggaatacatgagaaatcaagtttcggttgcaattactaatcataaacttcatgagagaactctatatttatctagatatgataaattaactaatgtatgtaacagaacgtggtttgaacaattaattcacagtgaaatttataatgaagataagaatatagaagaatttttccttgtagtttttgacttaaatgatttaaaacttgttaatgataactatggccacttggctggggacgaattaattaaggaattttcaaaaggcttaaatgctttggccggagagggcgatattataggaagatttggtggagatgaatttgtaggaatctttttgaattcagatttagtaagtttaactaacaagcttgaagaactgattagaaagtttaaagactgcccactagtatttgaaggaaacaaaattgtttgtagttatagctatggtattgctaacttcccaagagaaggaattgaatttgatgaattaataaagagatctgatagacgtatgtatgagtataagcgcaaagtaaaaagtaaaagagcattattaataggtgtataataaaaatgatcaatgattcttaaatatgaatcattggtcatttttaattttttttatgttaatgatataataccagttatatttattagatgaatatatttgcaagttttctagtattttaagttcgtatcttcactagaaatcataaatatattttcatagcttttcggaacaaaatatttatgattttggtaagttaccacataaatttagttttagagttagatatttataatataactcaatataaagaatgaattatattatttttataaaatttgaaattgttaagctaacttacagaaaactttattataataaaatttataaatgtatttttatttgatcagtattgttatggacaagttgcatttccatgattaaataatagatttgtaataaaggagttttcatatgtcagcgttaattaaaaagataatatatttaatatttactttttttataggactttttatagcatcatcattttttgttagggcaaagtataatacttttttatatggagataagccagttcttcaaaatcaaaaacttggtatttttatattcatgatattaattttagttttattaagtgtagatttatatagaatgtgcttaaaacttaacagatatagcaagaaaatagtaattccagtaactttggtatttagttttattattcaaatgataattatatttttatttactaaattaccgacagctgattctcaaacagtactatcattagctttaaatatgttgtataggaatgattattcgtcatttcaaagtagcggatatttatatatgtttccttttaatttttcaactgtattgtatttgaaaactttattaactatatttcccaataactatttagttcttaaaattttcaacattttatttaccctagttacgagtctaatcatttattacatatataaagagataaattataaatcaagagataatgattatggagttttgatatttgcatcaacctatataccatctttatttatgagtaattatatatataacgatattatagctacaacattgcttacaagctctatatattttttgataagatttgtgaaggatggatcaattaaatatattgtaattgcttcagtgtgtttatcaataggaaattattttagaagcgtaggaactattgttttaatagctgctgttttttatattttactgcaagtaaagaagactggagttaaaaaggcaataacatcattctgcatattaggagtgctatttaatattcccaattggaatcaaaatttcattttgcaggaaacaaatattgtgaatgaatctgttaataaaaattctgcacccatatatatgtggattaatatggggatgaatgaagatacgataggttattgggataatatgaaaagttacaatatatatcaaagacaggcaagatataataaagaaaaaagtacagagttatttaaagaagaaattaaaaataaattatcaaatatgggtttcactagtttatcaaaaatgtattatgacaagattatatggacttggacagaagggacataccaaattgaaacctttggcattggtaatgaagcagttagctcatctcagagagttggaagagaagaaaaagtatatagctataatacttttgcgactgaactatttaaaggagattcggtctatagaagtggattactttggattttgtacgtaatgaattttcttatgtattgttttatattcataagaatgataggtgtaataaaggaaaagaaatttgacgaagtgctcttagttttagtgtttttaggatttattggattttatgttttatgggaaataaaatctagatacatttatccaacataccctatattaataattttatcatacatgggatttaaagatgtgtatgaatttgtttcaagaagaagttttattaaatatatgttatcaattagaaaggggttgtagagatatgaagaaagtaatatatagtatagtcataattatgttattgtttatttggtcagtagtattgatttcgtgtcaagcaatcacagctcaaaatataaacattaatcctgcagatggatttaagataaatcaaggaatgaatggtggtcctagcataacaggaaaggcgggaatgggtgataatgcccataaaaatctaaataatcactagattttgtatgaaatatttcagttgcaaattagatataaagaacagaacaatacaaataattggaaatttgctgtataatttatatatactagtaaaaaagcaagaccagctaataatagtcaagttaattttaaaaaaaatagtttttggaaaaagagtatggcaaacaaaccgtttcaaaacacgaacggttacagaaattggaataaaattaagcgactttgtttaaagagttattttctaggaacatttgcttatgtattttgggatctctttgctcaaacggagtttgatttcggagaacagcaaaaatgtagtttataattttatgcattatagcgactaaggcgattttaggctttttgcctttaaggtttatttgataataatctaataggactttatttataggaactccattacgattgttacggattgaagctagtgcaacagaatataatgctcttcgaccgattcgagttcctctttttgaaattttattatcatcgcctttaaaattacctgattgattaactgagctatcaataccaaagaaagctacaagatgtttgggcttaagaaaaccatcaatatcacctatttcagctattatagtaatagcagttaattgccctatgccaggaattgaatcaattagttcaatattagctctaatagattcaggaaaagtttcagactgtataaaattgttaattttctgtaacaatatatcaatctctgattgaatagtttttattaatgttatagagctggctattttgacggctaaaccgtctaacggtaagccaattattttagcttcattagcaaccttaaataatttggaatatgtattttccgaccagataatgccctttttagagctatcaaggaaaatcttaattatattttccttaggtgcctctaaaattgattgtggcgttggatattgacttaaaagctcaattgaacttttagatgttgaatctgaaaatatagtattatagccaggaaaaataactcttaaatcagcggataattttttcttaaaagtagagctagtatctgtaagtttgtaatactctcttacaagatttttcagaagaaaaatatcaaggctaagttgttgtgataacttaatgttttgaaattttcctattgttgcaatagataaagcgtcttttttatcatttttcacttttcttatgtcgccatttttgttagacttagtaacgagtggattgataacaaatgtgttatcgaaatatttattaagatagtggaaaagagataaatggtacacgccagtggactccatgaaaattgcagttttcatgttaaactcttcttccactttttttatttcattaactaagtggttgaagccattgagatcatgctttattttaaatgacttcttataaatatcaccattcggtgcgagtattgcagtatatgaaaaatcagctgaaacatcaattcctattacaggactataaaaaaaattagacattgtatatatctccttaaattaaattttagatatagaatagaacttccactctgtcagatagcttataaccttgtttgtgacacgggtaattcccgaagggaaacccaaccagctaaacatagaattctacctgatgaaatgatacgcttttttacgggtataggttctaaaagacctcccaggaggtttacatctatcttctattcaggagtattatactagactatataaaacttggttagattcctttaaggaatttaaataaaaaactatttaagatatgaaatgcatattccctatcggggcgtaggcaaagtaataaattagaatattaaaaataataagaggtgtaatgttcgttagaaagataaatagttttctatcaaatgttacaactagattatacaaggaggttaaaatgaaaaaatacaggcaaattataaaaagaagtatatttttatcaatgatatctaacccaatatttgtatttatatattgtatttcgatttatgagctatatacgctttctaggtttggaagatttcataataatattattatattgtttgggtgtataatattccttttagtgtggcttacatatgtaataataaaaagtgtaaaaaagcctataagtgttccgcaacagattatagaaaaatataaatttaatgaaagcaatataaaagttttacaagaagacgaactagagatagattttcaagatataaagtcatttagaataaataggaaatatgctgttataacacttagaaacagagacatattagttttaagtatgatagatagaacagatgaagaaatagtcataataaagaagagcttgaatgatggaaagatttttaaatcaaattataaaactatatggatctatatagctatgatagttatagctgctacaacattattttacggagcaaaaatatataatgatacaataagctataacggaaaactttcgtggtttttaagtgatttaaaaaacaaaaagacagtgaagcttgaacataacaatatatatgaaaatggaatagaaggtattttcgcagacattaataaagaaattcatatgccagataaattgtatgtttcaagtaactttaatcttaattttaattccgatggagcaattacgtcttttgatacatatctttatggaaaagataataagggtaagttagaaagttatttaataagttataataatgacaaatcagataaaataacaatatatttaaatgggtatgcaaatgctgattataatgaagataaattgttagagccattgctaagtacaatgaaagctatcccacttaaggatacagtgagcaaatggaatgaaaataaatatgggattctttattacggtaaccgaagttttggatataatactgatggaattacttatattaatccagaagggagcacaaaagcagcttcaaaggcctcttcagagataataggttatgctgtttcagtattcgtacctggtaaagaaaaaatatatactccgtatagatatattttaacagaagatttaaataacattaagacgcatacacctttaaaagaagacaaagataaaagtatttctcaaaaatcaaataatcaggatgaattttatatgtctgatcaagttggttataggctagaagtgactggagctgcagctggaagcagatcgtactctttgaagagcacaattaatggtggaaatacatggacaattgtaaatgaagatccttttgcagggaaaacaggggtggcagctggaataagttttttgaatgataaacttggttttttatgtttatctcatagtggtggcagtaacggagaattatatcgcaccgaggatggcggtgtatcttataaaaaagtaagttttccagagagaaaagtaacactagataatggggaaaaatataatccttttgatttgccagatatgccttatgagcaagacggaatccttaatgttttaataggtcaaggatctgatggagattataatgggggatgcaaggctttgtatgaatcaaaagatgaagggttaacatggcaatatgtaaaagaagttgataataagtgattttgagtttttaattccagtaaatcaattaaaattgcagaagagtgagcttggtaaaaatagaggtaaaaatccctataattaatgacaaccagaaatctagataatttagttttaaaatataaactaggaatgtgatggattaatatgtatataaattattcattacattcctattttatatatatttctatgatgagttatagctttagtttcaataataaccgagctatttattattttcattatgaaagacctaagacaacaggagtagatttatatcctatcccaattctatcaattcccatatcaatcaattttagaaagtgctctcttgtctttatggcacctgaggccttaattttacagcgatcctttgcagtatccattattatttttatggtttcaggggtagcacctttgctagcaaatcctgttagaaaattagttgatgtcttaataaaatcaacaccagctgaaatagcgacttctgtagatttttttatttgatctaatgttagagcatcagtttcaaaaattgcatttacaagaatatcataatcatgacacacatcaacgacagcttttatatcagcctcaactgagtgccacaaattacttcgtgtccagccacaatttgcaactatatcaagctcatcaattccttgcttgcagcattcttctgcttgtaaaatttttgaggatgttgctgatgtaccaaaaggaaaatcacatacaacacatatcccagtttgagtttcagctgttaactctttagcaatatttattgaggatggatagacacaaactgttttgcatttataatctacacctttttgaatatactttctaatttgatctaaagtaaattctggctttagcactgattgatcaatgtaagatcctaattcctctatagtcatttcggcagctttttttgttggtatcataattttcgataacacctatttagtatttaatattctaatgtagtaattatgcagtattgaatattatttaggtattcctccttttgaatatattataatgtagttttactacaatgtcaattgatataatgtagtaaaactatttacaatataagagaattatcttagaatagtattaaagaaatattgaattggtagttttactacattagtgtaatatatatttaaggaaaactgcaaaacaaaggatgtggatgaattgaaccatactgagtcttacgaatataaaataaaaaatatgtataatttactgagatcatctgaaaaaaaagtagccgattatgtattattaaacgggcattctgtttctacaatgactttagcagagctttctcgtcaagtaggggtgagtgagccaacaattatacgttttgtgaaaagtataggttgtagtggatatagtgaatttaagatggcattaatgaaagagtggggaagggaatctgtagataagcagtatgattccaaattactagtagaacttcatattgatagagatgaaaaaatagaagatgtgccagtaaaaatgattggacttactataaaggctttggaagatactttaaaaataattgatattaataaatataaaaaggcaatagaaatgattagaagctcaaatatcattgatgtttacggtgtggggaattcgggaagtgttgctagtgatattagaaataaatttttacgtataggattagaatgcagagcatactctgatagtaatatacagcaaatctgtgcaagtcatctaacaagtaatgaccttgccattggtgtatcccattcaggaagcacaatagatactgtaaatgctttaaaaatagcaaaagagtctggagcaagaactattgcattaacaaattttaaagcaccagctatttctgaatatgcagacataacattttttactggtggtgaagaaactacattttatagtgagacaatggtttcacgcatatcgcagttagctattgtggatatgctttatatgggaattttgctagatgattatgatttatatactaaacgccttgaaaaaattaatcttttacttaaagaaaagaattatacaaagaaatagaaaatataaatttgcataattatatcagtaaaaatagtgcatataacaaagaaaaagcttctttgttatatgcactattttctattatatgattatattttagcaaagattttgattaatcaccaatttagctaggggattcaaaatatgcatcatatgaatatttaaaactaatatctaataggtattatagtacttcgagtatttcaactgaatatttttcacctggagcattgacttcaacaatgtcaccagctttatttccagataatgctttacctaagtctgattcaatacttataatcatattttcaggatcgagatccatagttgttactagtgttacaacaacctcatcatcatcttcgacaaacctaattctagctttgctattaattcctagtactgatttatctatactaccatcatctattaccgttgcagttgaaatcatagttaatagatactggattctattatcattttctctatagtttctgcaagcctctttatattcagcattttccgatctatctccgtgagcagcagctactaatttttcttttgctatttcagctcttttaactgtcatcctataatctaattcttctcttaacttttttatattttcttcagttagaatattattcataagaaagccgacctcctaaaatatattatgagaatattatataatatatatgaagaaaagttaaatcactaataccgtttattcttttattaaaatgcccgcgataatattttatgaaaacattgacatgcagttatagatatgctagagtgaaaaatatgatatagtatgtgactggtaggtaggcattaactatacataaatatttattgaagatgtttatgttggttaatgtttttttgcacaaaaaaggcataataaagcattaataatgtgcaaaaataatcctatgaaggagaagaattatgaaagacaaagtttttggcgttttgcaacgtgtaggaagatcttttatgcttccaattgctattttaccagtagcaggtttatttttaggtataggtgagtcattcactaataaaacaatgcttgatacgtatggaattacaggtttaattggacctggcacatttgtcaatgcacttctttcagtaatgaatgatgcaggaaatattgtgtttgaaaatttgcctttaatatttgcaataggggttgcaataggcatgtctaagaaagaaagagaagttgcagcgttagcagcaggaattgcatttcttataatgcatgcatcaattggtgccatgattaaaattcatggtggaacagaagctcttttaagtggcgcatcaactgaagtacttggtataatttcattacaaatgggtgttttcggtgggattatcgtagggcttggtacagcagcattgcataataggtattataaaattgaattaccacaagtattatcgttttttggtggaactagatttgttcctattatatgttcaattgtctatttaatagttggaattttaatgttttatatttggcctccagttcaaggtgctatttacaaagttggaaatatagtgcttgcatcaagttatgcaggaacgtgggtttatggtttgatggaacggctactaataccgtttgggcttcatcacgtattttatttaccattctggcaaacagcagttggaggtacagctcaagtaggagacaaagttattgaaggtgctcaaaatattttttttgcagaactaggaacgccaggaataacacactttagtgtttctgcaacaagatttatgtcgggtaaatttccgcttatgatatttggcttgccaggagcagcactagcaatgtataaatgtgctaagccagaaaagagaaaagcagtaggtggattattactatcagcagcattaacgtcaatgctcactggtataacagaaccaattgaattcacatttctatttgtagcaccagtattatatggaattcactgtgtgcttgctggacttgcttatatgttaatgcatatgttaggtgttggcgtaggtatgaccttctcaggtggatttattgatttattcttatttggtattttacaaggaaatgctaaaacaagctggatactgattgttattgtaggaatcgtatattttgtagtatactatttattattcaccttcttaattaagaagcttgatttaaagactccaggtcgtgaagattctggtgaagttaagctttatactagaagtgatttagaagcaaagaaaaatgatcaaaatgaaaacgcagacgaactttcggccatgatatgcagaggtctcggaggaaagaacaatatttctgatgttgattgctgtgtaactagattgcgttgtactgtacataactctgaattggtgaatgaaggtttgttaaaacaaactggagcatcgggcatatttcacaaaggcgtaggcgtccaaataatgtatgggccaagagtaactgttataaaatcaaatttagaagattacttagttacagcaccagataaagaagatactggttatgcaataataaaaaaagaatcagagaaagatactgaaaaaggtattgaaaaaaaggttcaaggaaaagttataagtacagtgattttaaatagtccattgacaggtgaagcaaaagatttatccgaagtaccagatgaagtatttgcgagcaggataatgggagatggagctgtggttgtcccaagcgatggaaatgttatagctccggcagatggagtaataagttttgtattcccatcaaaacatgcattgggattaacaacaactgatggacttgaattacttattcatataggaatagatacagtaaagcttgataaaaaagcctttgaaacttatgtggaagagggagataaagtacaagctggagataaaatattaagctttgacttagaatttataaaaaataatgcaccatctattgcatcaccatgcatatgcactgcattgaatagcaatcaaaaggtgcgtctattaaaaactggagatataaaagccggagaagctttaattgcagttgatgcatttgaataatatataagggatgaggaggcataaaatgtttagagtgataaaagcactaaatcataatggtgtactcgctataaatatggataactataaagagtatatcttgctcggaaaaggtataggttttggtaaaaaggtcaatgaacgtattgaagctccagaaaatgcacatatatatctcttgcagcaagaaactgaaagaggattgactaaggagataataaacaatatagagcctcagattttagaaattgcgaataatattattatggaagcagaaaagaaatttcatgaagtagacgagaacattttatgcccacttgcagatcatattgcatttgcagtaaaaagaataagagataatgaacaaattagtaatccattaacacaagacatcaaagctttatttccagaagaatatgaagttgcatgtaaaggaaaagatattatcaaagagatagaaggcattgaaataaatgaagatgagattggctatatagcacttcatattcattcaagcctaggaaatgaaaaagtatcacaagcaatgcaagtagcaatgttagttagatcatgtattacatccattgaagagagtacaggaaagacaatagatatcgaatcattatcctataatcgtcttatgaaccacattaaatatatggcggcaagaatgttaaaaggagaaacgataaagcttgatatgaatgattatattagtgaaagatttccaaaatcatttgaaattgctgaagacatatgtatgaaactaggtaaggaattgaagaaaaaaataaaatcagttgagataggataccttgcaatgcacattgaaagagtattctcagatgagttagaggattagaatatatataatataattttaatggaattataaaaatttaaggttgcgttttattgaaactagagctccacgataatttatcgcggggcttattttattctttaggaatttatattctagcgcctgcgatttttttattttggggaaaattataatgaaatctgagaacaatttttaaaggtattagaaatacatagtctacgaagcagattttacatttctataaaaatcaaaataaaaaaattatggatatttatgtcttagaatgagaattttaaagggagataaagatgttacaaattgtaatggatacaagaataagatataataaagccaatatatcgttgcaaataaattaatgttaagttaagttttaataaaataatttggaggcaggggaatggataaaaaagatttttctaatttagaaaatcaaattagagatacaataaaaaatgcattcgatgtcatagattttgctaagataaaaaaagatattgatgataaagctcaagaaactgttagagagacaagaaataaatttgtagataaatcacagtattttgataaaaagataaaagatgaattaaaaaatagatataaaaatatcgcgaatgttgttccaaaatctgaaaataaaatacagaaatatattgctaagagaccagttggaagtatatcaggaacattgtatacaatatttggatctatattaagcggaatattaggaatattaataatttcatattcaatacttatttcttttaagagtgaatttttaatgagtaatttgattagcttaggaatattgttttcttttcttgcggcgagtggagcttttactttaaggggtataaatttaagaaagagagcgaagcgttttaaagaatatgtgaaattgctacgaggtaatagctattgctccattagtgaattagctgaggctgttaggaaaaaaaataaatttgtagttaaagatttaagaaaaatgattgaattaaatatgtttccacaaggacatattgatgataagcagacttatttcatgttaaataataaagtttatgagaattatttgacttcacaggaatctttgaagaaaaggaatgaagatgaattaaaaaaacaagaggagctaaaaaaagacttcaatgatccagtgaagatggaactaaggaatacaattgaaatgggaagggattacattaaacaaataggagacataagtagttctatagataaagaagaaatttctaaaaaattaaataggctccagaatattataaatcaaatacttaagtatgttgagcagaatcctaaaaagcttcaagaagttgatagatttgcaaaacactatctgcctatgactttaaagcttcttaatgcatataaagaattgaatgagcagccggttcagggtgataatataagaaatgcaaaaaatgaaattgaaaagactttggataccataaataatgcatttgaaaagttattagacgatttatttgaagaaatagcattagatatttctacagatatttctgttcttgaaacactatttactcaagaagggcttaaaaaagatgatttcaaaaaataggacttgaactaaaaggaggaattaaaagtgaatgatggatttaaggaagatatagatatgatgccaagtttaacatttgaaccttttgaagaggaagttactgatgtaaaggtagaagaaagtaagaagaaagaaatttttgatgaaagctatttaacagaagatgagaagaagatgattaatgaatttgtagataaaatagatataaataatacaaattcaattcttcaatatggagtaggagctcaaaagaagattgcagatttttctgagacagcattaaataacgttaaaacaaaagatttaggcgaagtcggggaaatgttaacaaatgtagtgtgtgagcttaaaaattttgaatctgtagaagaaaaaaaaggatttctaggtctttttaagaaatctgcagaaaagatttcgcaaatgaaagcaaagtatgaaaaggttgaagggaatattaataaaatttgtagtgctctagaaaatcatcaaatacagcttttgaaagatattgctatgcttgataaaatgtatgaaataaataaggtatattttaaagaactttctatgtacatattagctgggaaaaagaagctttcaaaattagaaaaggatgagctgcctaagttagcagaaagagcaaggataagtggacttccagaagatgctcaggcgacaaatgattttgtggctctttgcaatcgctttgacaaaaagatacatgatttagaattaactagaatgatttcactccaaatggcacctcaaattcgtctcgttcaaaataatgattcattaatgtcagaaaaaatacaatctactcttgttaatactattccactatggaagagtcaaattgtattagctcttggagtagctcattcaaacaatgcagccaaggttcaaaatgaagttacgaacatgaccaatgagctgttacgtaagaatgcagaaacactaaagatgtcaacaattgagacagctaaagaatctgagcgtggaattgttgatattgagactttaaagaatacaaatgaatcgttgatatcaactcttgatgaagttttacgaatacaaattgaaggaagagaaaaacgtaaagctgctgaagctgaattacaagaaattgaaggtaaattgaaagataggcttctgcaaatgagacaaagataaaaaaataatgttttctgttttatcattttaaggtaaaacagttttatgtatctttcacagtgagtatgaattttagtttttttaattacaaattatcatgtataaatgatataattaaagaagttatatatggcaacgataatagatgtaagtatttaataaaagtataggcataaatagaataatatgtttattcaacatatacataagctataattatgaatacgatataaaacataggatcaatgctatgataactataaaaaaagtgaaaggatatatttttcaaaataatgctacaattacaagatcttaagtaagggggagagatattatgaataataacatattactagaatcgggtactggggaattagaaataatagaatttatcgcaaatggaaatcattatgcaattaatgttgtaaaagttaaagaggtaatagagatgccttcaaacttaactaaattgccagatcctaagccagagatagctggcctcatactatgcagagatgagatacttactttgattgatttaaaatacatattaacaaaaagatcggcaggaaaacttggatccaaggttatagtttgtgagtttaataaaataaaagtttcatttaatattgatgatatagttggagttcatcgtataagatgggatgaaataagaaaacctgatgatctatcagaaaactcattagctgttggaaatatacttttaaatggaaaagtattaattatgcttgattttgaaaaaatagtgacagatatttgtccaagtgttggaataagtgaagatagacttatacaagtagattataaagatagatcatctataaaattagttatggctgatgattctgctttaattagaaggttattaaaagatactcttacaaaagcaggatttaagaatttaagaatttttgatgacggtaaacaagcgttagatttcttcgaagaattagcaagaaataaaggtgaaaaatttattgaagaagctcaattacttattacagatatagaaatgcctcagatggatgggctcacattgacaagaaaaataaaagaaaatgaaacattgaaaaagcttcctgttgtaatattttcatcactaattacgggagaattaaaacataagggagaatcagtgggagcaaatgcacagctaagtaagccagaagtaagtgatcttgttgatacaatagacaaactattaggtgtttagaaaatgcatatttaaagtgtttatcattatgccaagcacaactagaataagtaaattttagatctactaaaattaatctaattggatagttaaaggtatgggtgaaaaattcatacctttttattttatatgaatttaagtttgcagataaaatatgaaaaagactgattaataatggaaagttgtataaatggagtaaaatagaaaatatatttacttggaaatttttcttacatacacttagaaatgcagctgattaagaaaatttctgatcatacaagcaactgagattttgttatttaacataagtatgtaattaacttaagagaaatattatatgacaattgattattatatggaaaatattgtataatatgtaatgtacaattgttaataacatgttatattattcaagagattttatattttacaaagagcgtttaaagggggaataatgtatatagaagctttacaatatttatataaaaatttcttgtatgtgcaaaaatttaatattaatagaatcttatataagggggtttttatggaagaaaaacaaaatagatctaataaaattgctaaagagatgataacctttttctattgtctgagcattgtattttttatttctcttattaatagtataggtgcatatgctgaaactacaaatgaaaaacaaaagttacctgaaacatatgcattaatattacaggaaagaggaggagttcaggaacaaattaatggacatgacattggtttgaaaactgattcaggtatcacatttgataataaattgttacaggattctataaataaactaagttgttctgatgatagtaaagtggttcaatctggaaatgctactttagtcttagtaaataataattatgtaatatcaaaagaagtttatggaaacaaaataaacaaatatatattatataaaagcatagtaaaagctatccaaaatggggatacaacattgaatttagaagctgctaactgttacgaaagttcagaacctagattcaaaataaattctccagcagttgttatcgctagagatacacttaataggtatttggcttctaaaattacttataattttgggggattaacacaatatttagatagttcaacaataaagaattggattggcgttgatagtaattttaatgtgacaattgatgaaaatatggttagaaactatgtagacaatatagcaaatacttatgcatcatcacttggtacaagcgtaaaggttagcggtggagataatggtaataaccatagttggatgattaatgcttctgaagaaacaaaagctctcatagataatataaagaatggacaaactataagtaaatatccaatatatactcaaacatctatatccagttattttagtaatgttggtgatacttttgttgaagttgataaaggtaaacaacatttatggttctataaagatggatatcttgttgtagaaggtgacctagttacaggtaatgaaagtactgggcatggaacaccaacaggcgtgttttacttaaattcgaagcaaagagattcagtattaagaggtgaagattatgcagcaccagttagcttttggatgccttttattaagaatgatattggtcttcatgatgctagttggagagatgaatttggaggggaaatatataagacggatggttcacatggatgtgtaaacctaccatattatgtggcaaaggcaatatttgataatattagcccaggctgccctgttattgttcatgagtaatattagagatatttctaatcaacacacgagagtaaaaagctctatttaattataattaatgcaaaggaaagttttgatctttttaggtcagaactttcctttttttataaataataataaacattttataattaataaattcaatttaaaatgttctaaatacaattataattacataattattaaaatataaaacttcaataaaagttacttaatatattttctgtacaagctataattttaggatttaaaaatgaaaattgtaaggttgaatgatgtcaggtgggataagtatgattaaacaaatattacaatacataaaatatccaaaaagaataatgatgattatttgtgccctggtagctatatattcaatagtttctatacattttatcaatcatttttattttggttcaacaattaacagagttgacgtctcaggtaaaacagtgcaagaggcagaagaagaaatattatctaaaatggacacatattcagtggaattagaagaacgttatggtgcaagggaagaaataaaaggaggggatattaacttaagatatgatttaggagacaaaattaaagaactgaaaagtaagcagatttcatttgcttggattttatcttttttaggagagaagaattatacaattacggattctgtatcatataacgaagatttattaaagaaaagctttaataatctttcttgtataacaggaagcagtgtagtggcacctaaaaatcctgaattagaatataaagatgatggatatataattaacaaagagatatatggaaataagattaataaagatgctttgtatgaacacttaataaaggcaattgttagtggggagaagaaaattaatttagaatcaattaattgctatgagaatcctaagtatatatcaacatctaaggaagttttagaagctaaaaatatactcgataaatatgcatcatcaaaaattacatattccttcggcgaagataatgaagttattgatggatcagtaatacacaattggcttaaagtagatcaagattattctgttgcaattgatgaaaaaaaagtctatgagtatatgaaaaaaattgctaatacgtataatacctcaggaaaaacaagagatttcaaaacatctttaggaacaataacaaaagttagtggaggaaattatggatgggtaattgatacttcacaggaagcaaaagagttgattaaagatattgggaaaggagagaatatagcaaaagagcctatatataagcaagttgctttatctcatgatagtaatgacataggcaatacttatgtggaaattaatatgaatattcaacacttatggtattacaaaaatggaatacttgtaatagaaggtgatgttgttacaggtaatgcaagcagaggctctccgactccaactggagtttatcgattaaattataagcaaaaggatgctaccttgaaaggtgaaaattatagtagctctgtttctttctggatgcctttttatgggaatgttggtatacatgatgcaagctggagatcagagtttggtggaaacatatacaaagcgaacggttctcatggatgcgttaatgcaccatattacctagcaaaggtcttatttaataatattgaagaaggtactccgatagtttgctattagtggcggttctaaatgattaaatttatataaaagatgagtcacaactatcctattgaagaaaatcttatcctagctggatatatcggaaaacatttacaaagaaaatttattgttatataataaattcataccgatcaataaaaaggaaaaattaatatttaatggttttcctataatagagttttatttgaacatagccaggattatttaataacaaaaaatagtttaattgattaaataattaaattaagaaaatttgtaaatactttaactaagtaataacactagaataaatacattgtttaggaggaattaatatgataaaaattagattattttgtgcagcaggaatgtcaacaagtcttttagttaataaaatgaaggatgcagccaagactaaaggtatagaagtagatattgaagcttttccagaaagtcaaatggataaaaatctagatggcgtaaatgttgctttgttaggaccacaagttggatatacattaggaaaggcaaagaaaatttgtgagccactaggaattccagtagatgtaataccaatggttgattatggaatgatgaatggtcaaaaagtattggattttgcattgaaattaacacagaagaaataaatgcaaaataaatctaagaattcataaaaaattttataaattctattaaataagctttcaagttgtttttgaaagcttattttttattttgtagtaggttatcattagagaatttatggatgctatgcccttttaaggcttaattttatgaaaatgatcgatttagaaagttacattttaatagagaattaaaataaaaaagatattgtatccgtacaatttactttttttattatatatgatattttaattaatattaaaatacagaagaaaggaaggtgatgtattctatgaatgagaaatttgtttatgctccgggtccgacaaatgttagagagaatgtaaggttagaaagagctaggataactactaatccagacgtagacgaagaatttgtggaattctataaaaatacttgtgataaaatagggaaaataattgagacaaaaaatccggtatatatactaagtggggaaggtattttaggattagaagcggcatgtgcatctcttactgaaccaggtgatagagtacttgttttagacaatggaatttatgggagaggttttaaggactttgttgaaatgtacggaggagaaggggtatatttttcgtgcgattataacaaagctatagatgaaagtaagttaaatgaatttttaagtgtggatcatgattttaagtatgcaacaatagttcattgcgatacgccaacaggagttttaaatgatttatctaagatatgcccattattaaatgagtatggaattttaactgttgttgattctgtttctgcaatgggtggagaagaaataagggttgatgattggaagattgatatagcattaggtggatctcagaaagcattttcagctccagcgggattaactatggtaagcatcagcgaaaaagctaaagaagcaatgaaaaatagaaagactccagtaatagggttttactgtaatcttaatatctgggaaaattattacgcaaataagtggtttccgtacacaatgccaataagtgatatcatggggttagataaagcggttgataatattttggacgaaggaattcaaaatgtacttaaaagacatgaaaaaatagcatatgcgactaggaaggctgttagtgaatttggacttgaattatttttagaagatggttattcaaatacagtaacagcagtcaaaataccggaaaacataggagctcagaggcttaaaaatcatatgttgagtaaatacaatactttaattataacatcactaaatccatacgaagatataattttaagaataggacacatgggggagaatgcaaaagttgataagattctttatgcattaaatataattgagaacggactaaaagatctaggctttgaaagtaatggtgaattagtaaattcatttattagacacttaaataattaattattaaattaagcaaaggtggggcaaggaatggaaataaacagaagaaaaagcaaatttaaaacaaaagacatggtagaaacagcactattgacagcgctagtatttgttgcaacagcgtttataaatattagattgccgatattagctactggcggattggttcatttaggaactgtaatgttatttgttacagcaattgtttttggaaaagagaagggtgctatagctgctgctgtaggaatggcaatatttgatttatcatcaggatgggcgctttgggctccatttacatttatagtaagaggaattatgggatatatggttggtgccatagcgtggagtagaaatgaagaaggtaatagtatcatacttaatcttttagcaattatcttatcaggtatttggatgataatcggatactacattactgaaggaatactttatggaaactgggcatcaccagttgcatcaatacctggaaatgtgactcagattgttattggattattgcttggattgcctattgctaaggtacttagaagatataaaaagtatatttaaacatattagaatgatgctttgaagtgatttacactattttaaagcatcattttttgcatttagtaaagcctataataaatgatattctgctgtgaaaatttatttcatgaataataatattgacgaaataaatatatcatattatgattatattaacttgatactgtatttaggaggatattgagaatgagtgataacgatttaaagaaaaatagtgctaaggaagccatgaaatatataaaagatgggatgatagtaggtctaggtggagggcggagcatagcttatttaatagaatttataaaacaggacaaaaatattaacgtaaagatagttactccttcagtgaaaacaaagatgctttgtatagaaaaaggtttagaagttttgtacacaagttctgtggataaagtggacgttgcttttgatggctgtgaccaagttgatgaaaaattaaatgcattgaaaagtggtggaggaattcatactaaggaaaagttaattgctagtatggcggaagaatatatccttcttgttgatgaggcaaaagttgaaaaagagttaacatttaatgttccggtagtacttgaagttttagaggattctttgaagtatgttgaaaaaaaagtactagaattaaatgggaaaccagtgattagaagtagcgatataaaagatggatttactataagtgataatggcaacctattagtagatgtattctttaataatgtaaaagatattcataaactaaatgataatctaataagaatttgtggagttatagaaacgtcattatttactaatgtaatcacaaaagtgattattgctagtaaggaaggtattagggaaatttcacaaaaataatttaattaagaatgaaatttaaaattaaaacgtatgaggtgaaggatatgaataaaataaattgggcagtactagggccaggaacaattgcagcagattttgcaaaggccataaatgaagtgaatgggaagatatatgcggtaggttcaagaaatattgaaaaggcaagggattttgctaataaatataacatagaaaaagcttacggagattatgatgagatgctaaaagatgataatatagatgtcgtttatatagcgacgcctcactgtaatcattatgaatatataattaagagtcttaataataataaaaacgtattttgtgaaaaagcaattactgtaaatggaaagcaattgaaagaaatagttgaattagcaaatgagaaaaaattaatagtggcagaagcaatgactatttatcatatgccgttatataaaaagttacgtaaaattgttgatgatggcaagcttggaaagattaaaatgattcaagttaactttggaagccttaaagagtatgatgtgacaaatagattttttagcccagatttagcaggaggtgcccttcttgatataggaacatatgcattgtcatttacaaggtactttctctctagtcagccagaggaaattttaactacagttaagaaattcgaaactggagtggatgagcagtcaggtataattcttaaaaattctgatgatgaaatggcagttatatcattaactatgagagcaaaacagccaaagagaggaattgtatgtggagaattaggatatataactgttgaaaattttccaagagcagataaagcaacaattacatatcctgatggaagtgtagaaattattgaagaaggccatggttcaaaagcattagaatatgaaattgaatgcgtaaatagtatggtaatgagtaaaacaggtaatgatactttaagattgtctgttgatgtcatggatataatggatgaggtaaggaaacaatggaatttaagctatacttttgagtaagaagttttatgaattaattacttgaatacgatgattaagggagtaattattaaagtgagagagatagaaaagagtgttctagataaaattctttgcatttataaaagcttacatgaagcagaaaaaaagattgctgattatataattaataataaagaaagagtcattgaaatgactgtttctgagttagcattagaaagtagtgttagtgaagctacaatagttaggttctgtaaaaaatgtgatttaaaaggtttttatgatttgaaaattaaaatagctaaagaaatggttaatttaaaaagtagtaatatatcaaatgaattagattccaataatataatgcaatcacttcaaaatatattagcaaataaaattgaagaattgaaacaaacaatttcaatgatgaatgaaggtaatataaaaagaatattagaagcaattaaaggagcgagaattgttcaatttgcagcggttggtaatacaatacctgtagcaatggatggagcatataagtttaaccagttgggaatatcatctgttactaataccatatgggaaacacaacttgcattttcatatactttaactaaagaagatgtagttatagtgatatctaattcaggagcttcaaaagagcttgtagctttacttgaaattgctaatgaaagacaggcaacaactatttctataactaatcatgagaattctcctgttgccaacaaaagcaaatatcatataaatacttcaacaagagagaaactatttctagatgagtttagcttttctagagtatcggctatggttgttatagaaatcttatacttacttttaacaagggataaagaagatgcatataattggattagtcagcacgaacaatctattgcagaaggaaagatataaggagaaattacaatagagggatatagtagatattttattcaaaattttaaatagatattagatttgaagaaggaagggtataaagatgaagaatataaatattgggaatagcgaaatcaaagcttctgaaattggacttggatgcatgcgaatggcatcagttgaaaagagcgaggcggaaaagatcatcaagacgtcgttagaagaaggaattaatttctttgatcatgctgatatatatgggggaggaaaatcagaagaagtttttgcagatgcaattaaaatggattcttccataagagaaaaaatgatcattcagactaagtgttctatagtaccaggaataatgtatgatttttcaaaagaacatatcttaaattcagtagatgctagtttaaagagattaaaaacagattatgtagatacattactgctacaccgtccagatacgcttatggaacctgaagaagttgcagaagctttttctaaattacacgaaagcgggaaagtaaaatattttggagtgagtaaccatactccaatgcaaatagaattacttaacaaatatttgaataacaaaataattataaatcaattgcaatttagtataatgcatacaggaatgatagatgcaggattaaacatgaatatcaaaaatgatgcttctatagatagagatgggggagtattagaatattgccgtcttaaagatataactattcaagcatggtctccttatcaatatggattctttgaaggcgtattcttagataatgacaaattcccagaattaaataagaagattaatgcaatagcagaaaagtacgcagtaactaatactgcaattgcaactgcatggatattaaggcatccagcaaagatacaaacaatagttggatctatgaatgctgaacgaataaaagaaatatgtaaagcatcaaatatcacattgactagacaagaatggtatgaaatatatctagcagcaggaaacaaattaccataaggtaaaattgatatctggcttggagtggaactaagttttactttaagccagatattttatgtgaaaaattaagccattgggcaaataaattgatagtgagtctaagcaaatttttaaagtgtaagaagttaatatgattaagaaatatgaagaatctaaatataatgcattggataactataccaggtgtatctatagtaggatattgtagtattatatatataaagagagaatttggaatataaaagctgcatattgcagatgattgagtatatgtagataaatattaatggtaagataaaagacgtcgctaagagcggtaaacaatttgaaagaaatattaaagaacttttaaataaaggaatttgaaattttaaaaaaaatgttgacaagttgaaaatcaagtgataaaatgaaaaagtcgcttgagggtgacaaaaaataatataaaattataacgaaagttgtaagaaagaaaattggtctttgaaaattgaacagaataagataaatacatttaagtaaaccagcaatttttatttgagtaagctaagattaaactttttattgagagtttgatcctggctcaggacgaacgctggcggcgtgcttaacacatgcaagtcgagcgatgaagctccttcgggagtggattagcggcggacgggtgagtaacacgtgggtaacctgcctcatagaggggaatagcctttcgaaaggaagattaataccgcataagattgtagtgccgcatggcatagcaattaaaggagtaatccgctatgagatggacccgcgtcgcattagctagttggtgaggtaacggctcaccaaggcgacgatgcgtagccgacctgagagggtgatcggccacattgggactgagacacggcccagactcctacgggaggcagcagtggggaatattgcacaatgggggaaaccctgatgcagcaacgccgcgtgagtgatgacggtcttcggattgtaaagctctgtcttcagggacgataatgacggtacctgaggaggaagccacggctaactacgtgccagcagccgcggtaatacgtaggtggcaagcgttgtccggatttactgggcgtaaagggagcgtaggtggatatttaagtgggatgtgaaatactcgggcttaacctgggtgctgcattccaaactggatatctagagtgcaggagaggaaagtagaattcttagtgtagcggtgaaatgcgtagagattaggaagaataccagtggcgaaggcgactttctggactgtaactgacactgaggctcgaaagcgtggggagcaaacaggattagataccctggtagtccacgccgtaaacgatgaatactaggtgtaggggttgtcatgacctctgtgccgccgctaacgcattaagtattccgcctggggagtacggtcgcaagattaaaactcaaaggaattgacgggggcccgcacaagcagcggagcatgtggtttaattcgaagcaacgcgaagaaccttacctagacttgacatctcctgaattacccttaatcggggaagcccttcggggcaggaagacaggtggtgcatggttgtcgtcagctcgtgtcgtgagatgttgggttaagtcccgcaacgagcgcaacccttattgttagttgctaccatttagttgagcactctagcgagactgcccgggttaaccgggaggaaggtggggatgacgtcaaatcatcatgccccttatgtctagggctacacacgtgctacaatggctggtacagagagatgctaaaccgcgaggtggagccaaactttaaaaccagtctcagttcggattgtaggctgaaactcgcctacatgaagctggagttgctagtaatcgcgaatcagaatgtcgcggtgaatacgttcccgggccttgtacacaccgcccgtcacaccatgagagttggcaatacccaaagttcgtgagctaacgcgtaagcgaggcagcgacctaaggtagggtcagcgattggggtgaagtcgtaacaaggtagccgtaggagaacctgcggctggatcacctcctttctatggagaaatctagatcagcatgatgtctgactagtacaaatacatcatagtatgtattaaatatttaaatacttgctcaaaggttacttaagtatttattctgttcaattttgaaagactaagtctttcgtaaatatgggggtttagctcagttgggagagcacctgccttgcacgcagggggtcaagggttcgaatcccttaatctccaccatgaagatttaattaaatataattaagtcttaaaatgttctttgaaaattgcacatagatttaatgtatataaaatacaacaaagccaagaataaatattctttgtgatatgactaataattaggtcaagctacaaagggcgcatggtgaatgccttggcatcaggagccgatgaaggacgcgataagctgcgataagcttcgggtagacgcacatagtcagagatccgaagatttccgaatgaggaaactcacatgggaaaccccatgtatcataaagtgaatacatagctttatgaaggtatacccagggaactgaaacatctaagtacctggaggaagaaaaagaaaaatcgattttcttagtagcggcgagcgaaaaggaaagagcccaaaccagagatttatctctggggttgcggacagaacataacgagaaatcatagttaattgaacacaactggaaagttggaccatagggggtaatagtcccgtaagtgaaaactatgataatcagttctgcaccagagtaccacgagacacgtgaaaccttgtgggaagcagggaggaccacctcccaaggctaaatactacctgatgaccgatagtgaagcagtaccgtgagggaaaggtgaaaagaaccccgggaggggagtgaaatagaacctgaaaccatgtgcctacaaccgatcagagcaccttatgtgtgtgatgatgtgctttttgtagaacgagccaacgagttacggtatgtagcgaggttaagtacttaaggtacggagccgaagggaaaccgagtcttaatagggcgactagttgcatgctgtagacccgaaaccgggtgacctatccatggccaggttgaagcgagggtaaaacctcgtggaggaccgaaccacgttgctgttgaaaaagcatgggatgagctgtggatagcggagaaattccaatcgaactcggatatagctggttctcctcgaaatagctttagggctagcgtcggaaaatgtgagtagtggaggtagagcactgaataggctagggggcatagcgcttaccgaaccttatcaaactccgaatgccacatactatcagtccggcagtcagactatgaaagataagttccatggtcaaaagggaaacagcccagatcgtcagctaaggtcccaaagtgtaagttaagtggaaaaggatgtgggatttctaagacaactaggatgttggcttagaagcagccactcattaaaagagtgcgtaatagctcactagtcaagagatcctgcgccgaaaatgtccggggctcaaacttaccaccgaagctacgggttcacgtttaacgtgagcggtagaggagcgtcgtaatcgggctgaagtcgtaccgtaaggagcggtggactgattacgagtgagaatgttggcattagtagcgagatgtaggcgagaatcctacaggccgaatatctaaggtttcctgagtaaagtttgtcttctcagggttagtcgggacctaaggcgaggccgaaaggcgtagtcgatggacaattggttgatattccaataccactataatcgttattatcgatggtgtgacggagaaggataggatgtgctagctattggatgctagtctaagcgtttagggagttgggattggcaaatccgttccaacaattctgaggcgtgatggggaaggttccacggaaccgaagtatctgattccatgcttccaagaaaagcatctagaaagagaagtagtgcccgtaccgcaaaccgacacaggtagatgaggagagaatcctaaggccgacggaagaattgcagttaaggaactaggcaaattgaccccgtaacttcgggagaaggggtgcctgagaaatcaggccgcagagaataggcacaagcaactgtttaacaaaaacacaggtctctgctaaagcgaaagctgatgtataggggctgacgcctgcccggtgctggaaggttaaggggaacacttagtggtaacgcgaaggtgtgaacttaagccccagtaaacggcggccgtaactataacggtcctaaggtagcgaaattccttgtcaggtaagttctgacccgcacgaatggcgtaatgacttgtgcactgtctcaactgcaaatccggcgaagttgtagtgcgagtgaagatgctcgctacccgcgattggacggaaagaccccgtagagctttactgtagcttagcattgaatttcggtattgtctgtacaggataggtgggagactgggaaactagggcgtcagccttggtggagtcgttgttgggataccaccctgatagtattgaagttctaactggatgccatgaaactggtgacaggacattgttaggtgggcagtttgactggggcggtcgcctcctaaaatgtaacggaggcgcccaaaggttccctcagaacggtcggaaatcgttcgaagagtgtaaaggcagaagggagcctgactgcgacacctacaagtggagcagggacgaaagtcgggcttagtgatccggtggtacctcgtgggagggccatcgctcaacggataaaagctacctcggggataacaggctgatctcccccaagagttcacatcgacggggaggtttggcacctcgatgtcggctcgtcgcatcctggggctgaagtaggtcccaagggttgggctgttcgcccattaaagcggcacgcgagctgggttcagaacgtcgtgagacagttcggtccctatccgtcgcgggcgtaggaaatttgagaggagctgtccttagtacgagaggaccgggatggactgacctatggtgtaccagttgtttcgccagaagcatagctgggtagctaagtcgggaagggataaacgctgaaagcatctaagtgtgaagcccacctcaagatgagatttcccatagcataagctagtaagaccccttgaagactacaaggttgataggtcagaggtgtaagtatggtaacatatttagctgactgatactaataggtcgagggcttgaccaatatagtcaagttgtaaatacattaaagaaactgtgtgcaattttgaaagaacaaaactttcataaggaatacaaatcgctaaaacgatttgcataagtttttcaaccaaatcagagatttgggaaaagctaatatctcgtaatgatggcatagaggtaacactccttcccattccgaacaggaaagttaaggtctatagcgccgatggtactgcatgggagactgtgtgggagagtaggacgttgcgaggtaagcaaaaaagatagttgtaataactatctttttttatttattatcataaaatattttaaataattaaattattgtatagaacattttaagtgttctatatgtcctgtaactttaactttcctataaatctttgatataatcccattttcatctattacgaatgtacttctttcaatccctatggatttcttcccaaacatatttttttcctttaatacgccgtagagattacatacctcttctttttcatctgaaagaagaatgaagggcaattcatattttgcaataaatttatcatgagacgctagagaatctctacttatacctaaaataacagcatttttgatttcaaaatcatctaaagcatttttaaaatcttgtgcttcttgcgaacacccaggagtattgtctttagggtaaaagtacaagatgacttttttatttaaataatcacttaatttatgttcttttttatcagatcctactaatgtaaaatcaggagctttcattccttcttctaaagttaaactttccattttattacctccatgtcttttataataattattatctatcaagattaaatatttgtaaagtagaaaagaaatattgcgactgggtttatttagaatatatgactgtgaattctagataaaataactaattgataaaaaatacatgcaaaatttaaaatactgttgacatatatagcaataaaatgtatactttatatcatagtaaacaactaagaataatataatataataatttttatcaagaaaggcggagggactggccctatgatgcctagcaacctgaattaaaaacctattttaatttaaggtgctaattcctgcagatattttatctgaaagataagaatgtacatatttttttgctactttcttatctagaaagtagctcttttattatctaaatgtctaattatttgtatatttctctagggtcgtgataaaaatcaaattcaaatctaaatataatatctagaaaattagggtaacgtacaaatcatagtaaatatattaaaaataaaaattatataaaatgggggcaacaaattatgagtaatcaagaaagaaaattaaaatttgaaacacttcaacttcatgtagggcaagaacaacctgattcagcaacagattctagagcagtaccaatttaccaaacaacttcatatgtatttaaaaattctgcacatgcagcagcaagatttggattagctgatgctggaaatatatatggtcgtttaacaaattcaacacaagatgtttttgaaaaacgtgttgcagctttggaaggcggagtggcagctcttgcggtagcatctggagcagcagcaataacatatgcattgcaaaatataactaaagctggtgatcacatagttgcagaaaaaactatatatggaggatcttataatttgttagcacatacgtttcctacaaacggtgttacaacaacatttgtagatccatctgacctatcaaattttgaaaatgcaattcaagataatactaaagcaattttaattgaatcacttggaaatccgaactcaaatattttagatgttaaagcattagcagaaattgcacataagcataaaataccactaatagtggacaatacatttggaacaccatacttatttagaccgattgaacatggggcagatatagttgttcattcggcaactaaatttattggtggacatggtacatcactaggtggagttattgtggactcaggaaagtttgactggataggttcaggaaagttcccacaattatcagaagcagatccaagttatcatggaattaagttcgcagaagcagttggggctgccgcatatgtgacaagaattcgtgctattttattaagagatacgggtgcatgcataagtccatttaatgcatttatattattacaaggtttagaaactctttcacttagagttgaacgtcatgttgagaatgctttaaaagttgtagaatttttaaagagtcatccaagggttgaaagtgttaatcatccatcgctaccagagagcgctgataatgctttatataaaaaatattttcctaagggagcaggttctatattcacattcgaaattaaaggtggagcaaaggaagcacaggaatttattgataaactacaaatattctcactacttgcaaatgtagctgatgttaaatcattagtaattcacccagcgagtacaacacattctcaaatgaatgaaactgaactagcagagtcaggaattaaaccaaatacaatccgtctttcaataggaacagaacatattgatgatataatttatgacttatctcaagcatttgaaagttaggagtcatttagttaataaagaaaataattattcagcttagttctaagaaaaagttttgatagattaaaagtttttggttagttacttaagaggcagaaggcaaacagtcaatatgagagtttgccttctatttttctttggagtgataaattcatgatagtaattaatatggtgtaaaacacaatattatgagaacaatatagaattattagttataatttaaatgttttattctatagtcgctaggatacacacctacattagatttaaatactctgctaaaatagaaggcatctttataaccaatcaattcaccaaccttttttatttccaagtcaggctgattaattaaaagctgtttggcttcattaatgcgaattctagtgatatattttatcggagttactccggtatatttcttaaaaatcttacttatatattcacttgtaaatccaaatttctcagaaatttcggttattgatgtcacagaggcatagttattaagcaagtaattttcaagtaactggcttaggctttcaggctttagactgtggtgatcaattgaaaatgaagagaattctttactttcggactcaagcataacaagaatgctttgtaaagcagtgctaagttcttctatttttactggttttaataaaaaatcttttacaccatattttaatgcagtctgagcatatttaaaatcattgtatccacttaataccatagtctttatatgaggatgatttttgtagagatatttaattaattctaatccatcgtattgaggcattcttatatcagtaataactagagatggacattgctgttctatgagaggaatggcaatttctccattgctagcttcacctactaattcaaaaggaatagataaagaattaattttttttattatattctgtcttataagatgttcatcttcaacaacaataagtttataggtgtgtgtattgttcataaaaatcctccttatttagatgtatgggcccaccgattataaaaattgttctatttttttgagaattatcaattgaaaatatagcttcagtaccatataaaagttgtaatcttagatatacatttttaagtcccattccgccaattcttaatgattttagttctttagttctgtttaaattatagagattagataataatttctctttatcttgatcacttaaacaaccaccattatcttcgatatatataagccacttttgatcatttgttatagaagatttgatatctaaaatccaaggtggtgaggagctaaagccatatttaaaagcattttctactataggttgtattattagtttaggaattaaaatgttctttgttgattcatgaatatttgaagtataaataaaatcacttccatatcgcattttcatacattcaatatatttttccgtatatgatatttctaaagataaatgaacagcagtttcatcgcatgttgtaatataacggaaataatcacacaatgcatgacatatattaattatttcgctattcatatcttcttcagccatgatacttatatttgttaaactattatataaaaagtgtggattaataagagattgggtcgcttgtagttttgcacgagtttcttctgattttaataataaaatttcatgagaagaatctcttaatttttcatacatatcacaaaacgattgatagagctcggaaatttcaagtatattactattaattggaactaatagagtttcattttcatttaatactctgtctatagtgaccatctttgtagaattagttaaagtacttaaaggttgagttaatctacttgaaattataaaacataaaaatagtgtaaaaatgattgaaattatagctataataataaaaccttctttaaaggagtgcaatgatctgaaaacaacttccttaggttcaacggcaatgattgtccaattatatgaatcgactttttgatacgacatcaggacatcatgcttactatctatattaataaaatacccaactgatggacttaaattgtgttcttgtatagtattagtataatttatattatcttctggggcagatgaataggggtaaactaactcattatgttcattatatatatagaatgatgttgaaggatttttttgctttaattctgaaattagagagaatacagtgttgcaatcttgtactacttcaacaataccttctggttcattatttcgattaaagaatacacgtgaaagtgaaagataatgatggtttgacatattttcaattttagtaggagagtatgataatttatcagtaagaaaaatatttttttcaccatttttatctaatgtatccttataccatggtacagtattcaaatctacatttattactccttgaaagaaacctgatcctatacatattccattttgtgtataaagattaacttgactggctgattgaaagggaccgattatagcagtaataatatcatatatagctaaaacgttttctctagattgagtaaaatgttcgagatttattgtatctgtgttattatgtgtaaaactagtaaaattcttttttatagcattcgagtagacaatattcatggatattgtggacatattatttaattcggttgatactgatttatgaatagaggcactgatagtttcagatttggttttggctgtttggtaaatattatcactataaaagtaataaaaacaaagaaagaataaaagcaataataaggctactagtaacccataaatagaaaataagtatgtcttttgagaataacgtaatttataattcattataatcctcctttccaaaacacattatataataatgttcaaaaaagtgcaaaacggagttcttttttatctatgtctaattaatatacttagtgatattataagcatgtagccaatgtaaagcatatcagaaatatgcaccaaatatttatattaatgggggtatagttaatgagtaaacgtttattaaaattagtcagtacggtttgtatgacagtactgatagggagtgcttttgtagggtgtggaagcagcagtggagatggaagtaaaagtgcatcgggaagtggagattcagttacattaacatttggatctcatcaatctggtcttccaacatctggagttgtacaggatttggcaaaagattttgaaaaagaaacaggaattaaaattgattttcaaatttctccggatgctcaatggcgtgatttacttaaagtgaaattggattcgggtgaggctccagatattttctgcgcggatgccgatcctttaaatctagtaacaagagttaatcctgaaaaatatgtattagatgtatcaagtgaagaatgggtaaagagaatggacccaaatgttcttccttcaatctcatacaatagcaaagtttatggtatcacttttccaggtaaaaaaatgtatttctatgtttacaataaagagatattcgataaattaggtttgaaaataccaactaattatcaagaattcaaaaatgtatgtcaaaaaataaaagattcaggagtcactccaatttatgaaggaactcaaaatggatggcatcaagtacttccattatttgaaacaggagcaatgtatcaacaaaagcatccagacttatataataagcttaataaaaatgaagttgatttagattctatacctgaattacaaactataatcaatgaattaaaagaatgtgctgatttaggtttttatggagataattacttaagtaattcagtagaaaatgcaaaagaagcgatggcaaaaggaaaagctgcaatgtttatagcagaatcagcatggagaaatgaagtgaagtcggatttccctgattttgacgttaataagttaggtatatttgcaatgccttggggagataaccaaacaattggtgtgaatcctgcaagtaatgcatattttataaataaaaatggaaagcatgtagaagaagcaaagaaattctttgatttcctagcaagacctgagaatttacaaaagcgtttggatggacaaccaggattatcagaattatgctggcctgaagtaaaatcaaaatattcaaaagaggaccaagcatacattgattcattgcaaaaaggaatggttatgcaagctggcgttaaatatattgacagccaatggatggatattggaaaagacttagaggctatgtatagtggttcatcaactccaaagcaagtattagaaacaattatgaatagaagaacagaacaagctaaattacaaaaagatcctgattgggataaataattacggttatatgaaaataaggtttctccttttgaaaccttattttattagaatggagggatttaaatggacagaaaaaaattatatccgtggtactttacaagcggggctctattaatatttttcttactttgctttttaccaggaattataggtatattttattcatttacagattggaacaattttacggacaagatcaattttataggattcaaaaattatgctgaagtatttaaggggaaaccggaataccgtgcatatttgtggaatacggtattatttactacagttacaacaatcatgaaaactgtagttggcctagctttagctctactattaacacaaaaatttatcaaactaaaaaactttcatagaatggttatcttttctcctcaagtaatgtcttatttagtagtaggacttgttttcaaaagtatgctacatccagatacaggatttgtaaataattttcttaaatctgtaggaatggatttcttggctatgaattggctgactgatttaaaaattgtttttgcaactgtcatgtctgtagatacttggaaaggtatggggtacataatggttgtaattattgcaggattgatgtctatttctcctgattattatgaagcggcaaatattgatggtgctagtttctggcaaaagtttcgtttaataaccttgccattattaaaaccaattattataaatgtaacaatattaaatgtaacatatggatttagagtatttgatatgatttattcattaacaaatggagggccaggtaatgcaacaggggtaattaacacagcagtgtataaggaattttctaaaggaaattatgcaatgggtactacattatcgagtatattattctttggattattgctattagtatatttcattattaaatccatggaaaataaggaggtagatgcataatggtcactttaaagaagtcaattggaagtgtagcagccaatatagtaacaatttttataagtttattagtactaataccaatggtagttttatttcttaattcttttaagactcaaggtgaatccaataagatgtccctttccctgcctaaagaatgggtatttgcaaactataaaacagtaatcgaacagggaaaattggtctcatcgtttttaaacagccttttatatgctacttgtagtgttttaataattgtaattgtagtagcagcagcagcctttgttattgcaagaaatcgtaaaggtattaataattttatatattactttatcctttctggtatagctatacctattaacaacgttgcgttaatgaaagttttgcaagcattaaatcttgtaaataccaggttaggtattattcttgtttatgcagcaataaacattcctcttagcctatttttatcatatggatttatctcaacaatacctagagagattgatgaagcagctgttattgatggatgtggaccaattagattatttataaaaataatacttccattattaaaacccattatttcaactttatttgttttgaattttatggttgtttggaatgactttacaatgcctttatattatttaaataattctgcaaaatggccgatgacattagctgtttataatttcttcggagcatttgaaaattcatggaatttagttagtgcagatataatactaacattgctacctgtattaattatatttatattaggacaaaaatatattgttggcggcgtttcagcaggatctgtaaaaggctaattgaacaggaatgttatagttagataatttagcatagtttaaataggaagaataaataaaataatagaatttataaagttcctaaagacaaaagcttatttaggaaacagagtaggagcgtgtattaatatgaaatttagcaatggatgctggctggacaagccaggatatcagatatttagccctcaagaagtttatagtactaaaatagaagatgatgttgtaactctttatgcaccatgtaataagataaaccaacgaggagatacattaaaggggccagttataacatataaaatctcttcgccaatggaaaatgtaataagagttagagcatatcattttatgggacaacgaaaaaagtctccaaactttgaaatttataaatatgagaaggttaatagtttaatagaagaaaatgaaaataatataatatttaaatcaggagatcttaaagctgtaatagataaagatgtatttcaaatgagcttttatagaggggataaaaagctaacgtctagtatgccaagaggactagcatatgttaatactactgaagaaagagtctttatgaaggttccagaagaaggagtcttcatgaaggaagaattacaattatcagtaggggaattggtttatggacttggagaaaggtttacccctctagtaaagaatggacaaagcatagatatatggaatgaagatggaggaacaagtacagagcagtcatataaaaacataccattttatattactaataaaggatatggagtatttgtaaatcatcctgaaagggtatcttttgaagttggttcagaaaaagtcactaaagttcaatttagcgttcctggagaatgtctagattactttataattggtggagaatcaatgaaagaagtagttgaaaattatacaacactaacaggtaaaccagcacttccaccagcatggtcatttggattatggttaacaacatctttcactacaaattatgatgaagaaacggttaatagttttgttgatggcatggcagatagagatctgccacttagagtatttcatttcgattgcttttggatgaaagattttaattggtgtaattttgaatgggatagcagagtattcccagatccaaagggaatgcttacaagattaaagaaaaaaggattaaaaatatgtgtctggataaatccatatattgctcaagagtcaaagttatttgatgaaggcatggaacacggatatttgataaagaaacctaatggtgatgtgtggcaatgggatttatggcagcctgcaatgggaattgtagattttacaaatccagatgcatgcaaatggtattcaggtaagcttaaagaattaattgatatgggagtagactgctttaagactgattttggtgaacgtataccaacagaggttgaatatttcgatggatcagatccatataaaatgcacaattattatactcaaatatataataaggtggtatttgagactttaaaagaaaatttaggagacgatgaggcagcagtatttgcaagatcagctactgttggaggacaacaatttccagtacattggggaggagactgcgaagcgaactatgaatcaatggcagaaagtttaagaggtggattatctctttgtatgtcgggctttggattctggagccacgatataggaggttttgagagtactgcaacagctgatgtatataagagatgggttgcttttggattattatcttctcatagtaggttacatggaagcagttcgtatagagtaccatggctttatgatgaagaagcttgtgatgtggttagattttttactaaacttaagtgtagaataatgccatatttatataacatagctaatgatgtatcaaaaagaggtgtaccagctatgagagctatgatgttagaattccaagatgatttagcttgtaattacttggataaacaatatatgcttggagattctatcttagttgcacctatctttaatgaagaaggagaagcaaattactatttaccagaaggaatttggactaacttcataagcggaaagaaatataagggtggaagatggatcagagaaagacatgattacttaagtgtacctatgatggttaaagaaaatagtttaattgctgttggaaatgaaagttctaagccggactataattatagagagaatgtatcaattttggcctatgaattgaaagaaaataagaaaactgccacaagtgttgtagacatgaaaggcaacaaagttcttgaagtggaagtcaccaaaaatgaaaaaaatattattattgaatctatgggtacagaaggagaatggtctttagtactcaagaaactttctaatatagaaaatgttgataatggagtacttattcatcaaggagaggatacaataattaaatttacagatggaaattgcaaatgtaattgtaaattagaattttgcatgtaacaattttaatataaagcgcatatagtatatgtaagaatctagaaggtaaactaaatttattattagttaacttctagatttttattatataatgaatattttataacctataattgatattataatggtatataataaagttaggaaaaaatataaatacagacttggagtgaatatttatggaactaaattggagcctaaaggaaatatatccgtcatttgatggcgatgaatttaaacaagacttaaataaattaacagatattattgaagaaatcaataaatgggcattagaagctactaaaaataaaaataacttagtagaaaaattagaggactatataaatagatttacaaaagtaacagacttatctagtagaattagtatttttataaatctaagcttaagcgtaaatacaaaggataagaatgcattgaggtattcagatattttagaaaagaaattaacaaatctaattggcagttcagttaaatttgaaagatatattagcagcatagaaggcctggatgaaataataagtaagtctaagctacttaaggaacatgaatttatgttaaaaaatatagttgaacaaagtcaatatttgctcagcgataaggaagaaagtataattgctaatatgaaaaatacaggctcaaatgcctgggcgaaacttaaggataatttgatttccacattattagtagaaattgaagaagataatgaaattaagcatataccattaacaatggttttaaatatggcctatgataaggatgcaactgtaagaaaaaaagcatatgaagcagaaataaaatcttataaaaaagtagaagaaggtgtagctgcggcattaaatggaataaagggtgaagttttaacagtttgtgattttaggggatataaatctccacttgaaaagacactcatagattcaagaatgagtgaagagtctttagaggcaatgtttttagctatgaaagaaagtcttccggtatttaggaaatacttgagaagaaaaggtgaaatgttaggtcataaaaacggactaccattttatgatttatatgcacctgtttgcgaagcagatatgaagtttacatatgaagaaggtactaaatttgttgaaaaaaacttcagaacatttagtgacaacttaggagattttgcaaggaaagcaattgataatcattggatagatgtgaaaccaaaagaaggaaaagtaggtggagctttttgcgagaatctacatttcaatggagagagtagaatactcctaaactatggtgataattttggagatgtagtaactctcgcccatgaattaggccatggttttcacggagagtgtttaaataatgagactacgttaaattcagattatccaatgccgatagcagaaaccgcatctacattttgtgaaacaataataaaaaaggcagcaataaaagatgcttctaagaatgaagctttagcaatccttgaaactgaaattagcgattgcacacaagttattgttgatatatactctagattcctatttgaaaaatcatttttcgaagctagaaaaggaagttctttaagtgttgaggaaataaaggatcttatgctggatgctcaaagagaagcatatggagatggattagatcctgattttttacatccatacatgtggacttggaaacctcattattatgatgccgagtataattattataattttccttatgcgtttggattattatttgcaaaaggattatatgctgaatatttaaaaaaaggaaaaactttttcgaaggagtatgaaaaattactttcaattacaggaaaaaataaaatagctgatgtagcaagagttatgggcatagatataaatgatacagaattctggagaaattctttaaaaactatagaagaggatatagaagaatttatagatcttagtaataaataagaaaaatttttatggaattattcatcaaataaatatatttttatttgatgaataataggtatagtaggggttagaggagtaattttaaatgaagatattttataatacatcgactggtaattcattgtatgtagcaaaaattataaaagaaagttttaaagattgcgaattagtatccatgagtaaggtgttaaaagaaaataagtttgatatttgtgaagatattattggatttatatatccaattcattgttcaggactaccgattgttgttaatgaatttatctcaaagttaaaggtaaatcaagatgcatatatttttgcaattggagttacaggaggcggtggagcaaatactagctttgttcaaattaataaattattaaaaagtaatgttaaaataagtaattattgtactattaggtatatttctaattatatgcgagcaggtagaaatcctactaaagctagagctgaggaaactataaaagaaaatgaaagtaagatagtggattttatagagtcagttaagagaagagatgctaaagaaattaactttaaagctggaattggaaatttagcatataagatatggaaagatttttatagaaataaagatagaaactttaatgtaaatgagaaatgcattagttgcaatatgtgtaagaaagtttgcccggtagataatatcgtgatagaaaataatagaccaaaatggttaggaaaatgcacagactgtatggcttgtataaatatatgccctaaagaagcaataaatataggaaagtctacaattaaaaagaacagatatttaaatccatatataaagagagaggaattaatatagagatataagataaaaaaataatataaaaaaatcctaaaaatgataacataaatgtaataatatggtaaaatatttatataaataatatatgaatggggttgtcaagtaatgggtttttttaaaaaagatgatattcaagaaaaagaagttcaagtaactaatgaaactaaaattgagaatttagagattgataaaagaatttctaaaaagaaaaatttatctctttttgatgtagatacgattcagtatgtaattaaaaattttccatccatgtccattgaaattcaaagtggtctgagcaacttggcaagcatactagaaaataccatagaccacattgaagataagtcaaatgaaataattaaaaaagatagggattttaaattaagtaaagcttatagagatacatctatagctatatatagcgttgttgaaaacataaatgaatatgttaagtggatgcaagatgaatatgagaaaaatatacaatctgatgaagaaagtatttgtaagataagaaaagatttggtggaaattaagaaagaagcatctatagataaagaaaaacaagaattaaaaaataccttaattaatgaagaagctatagaaatatataaggatttttcattaaaagaacctaaagcaataaagttggatgataatattatagatgttgaagattgggatgacttacttgttaaaacagctgaggtacttacaaaacaatataaaaaaaataaaaatattaataagactatgaaatcaattaaaccagttgaaaaaaaatctccacaaaattcttttagggatactgttatagatatgctaacagagtataagataaattttgatgaatttaaagttatagtgaagtaagatatgtagagtaattcttgtatttcaaataaatcagcttacgcgcaaagaaatatttgcattttaagctgattttttatatagttaaataataataaaaatattgacaatgaatattataaaaagtacaatatgattataaaagattgagttaaatttaatttataaaaatttaatttttcttatgaatagtaaatataaaaaagtttaaaatagctagagatatgtttaaaaaagctttagtttaatttataagatggaggaataaagtatgaaaatagtagatactaacgaatttaaaaatgaaatagagagtggagttacagttgtagatttctttgcaacttggtgtggaccttgtaaaatgttatctccagtgcttgaaggattatcaggcgaaatggaaggaaaggctaaatttattaaagttgatatagatcaaagtttagacttagcaaatgagtttcaaatttcaagcgttccaacaatgataatattcaaagatggacaaaaagcagagcaacttataggatttttaccaaaagaaaaaattcaacaagcaattgaaagtaatctataaaatattttctacattaaaaaacatagtgcaatattaaaatgtactatgttttaattttaaataaataagttgagtaaaattaaattttataaaggttactttttaagcataattatgtaaggagagataatcatgaatttttatagtttttctgcaaataaaatgaatggtcaagaagtaaaaatggaagaatataaaggaaaagtagttttaatagtaaatactgcgagtaagtgcggatttacaccacaatttgaagagttagaagatatttataaggaatataaagatcagggattagaaatattaggttttccatgcaatcagtttgccaaacaagatccatctagcaatgaggaaataaattcgttttgcaaattaaattatggagttacttttaccatgtttgagaaaattgatgtaaatggaactagcgcacatccgctatatgaattcttgaaaaataaaaaaagaggactctttaataaggatataaaatggaattttactaagtttttagttaataaagatggagaagttatagggcgatattctccaacaacaaagccatcaaaaattaaagaagatattataaatttgttaaatgcttaaattattgcatttttgaaatagacattaagtggtgcagaagatatattataattatatagtttaaataagatagtttataatagaaataggtttataattaaatatacgtaaatggaggaaaaaaagatgagcgaaagatatgatatagcaataataggaagtggacctgcaggtttgtcagctgcattgaatgcaagaataagaaaaaagaattttataatatttgggaataaggaacttactagtaagcttgcaaaagctcatgaaataaataattatctaggtttttataaaaaaagcggtaaagaattgcaagaagagtttaataaacatttagaagaaatggatataaatataactgaagagagaattaataatgtatatgccatgggagactattttgctttaatggtaaatgaaaaaatatatgaagctacatcagtaatattagccacaggtgttgaatacggaaaattatttgatggagaagaaagacttcttggaaaaggagtaggatattgtgcaacttgtgatgctccactatatagaggaaaggtagttacaatagtttcttataataagcatgaggaagaagaggctaattttattgcatcaatagcatctaaagtaaattatattcctatgtataaggaaaaagttgaggtagatccttctatagaaattatcaatgatacaccagttggaattataggaggagataaagtaagcaagctgaaactaaagaattcagaaattgaaacagatggtatttttatacttagagatagcatttctccaggacaattggtaccaggattaaagatagttgataaccatattgaggtagatagattaatgagaacgagtattaaaggatgtttcgcagctggcgatattgttggaaagccatatcaatatataaagtcagctggagaaggcaatatagcagctttatcggcagtaagttatgtggattctgtttctaaaaaatagtaaagttatagaaataagatatgttatctataatattgagcataagtgagctttatgtattggacgaaaagtgctatattaaaattgacatgccaaagcaaaaaagttaaacttactttggtttgttaaaattaaatttatataaatgatatggcggttataggagaatgaattatgaataaatcaaaaaaatatgaaagtataaaattagacaatcaagtttgcttttctttatatgcagcatcaagggaaataataaaattatataaaccaattctggataaattcaatctaacatatacacaatatatcgcgatgctggtattatgggaagatgaaaagagtacggttaaggatataggacgaagattgcacttagattctggtacattgacgccactattaaagaagattgaaggaatgggattaataacaagatatagagacacaaatgatgatagagtagtaattattgaattaactgaaaaaggaagacttctaaaggatgacatattagaagtaccacgtcaaatagtatgtaaagctaacataacaactgaaagtgctattgaattaaaaagaaatttagatgaattattaaaatctttagagtaactttgactgattttgtctgggccctgattagatattttttggaggaatttctatatggaagatgtacttaataaattaaaggggaatgaattttttcaagatttaagtgttgaggaaattagggatcttatttcaaatattggatataatttaagatcatataaaaagggagaaattattgctaatgaagaagatgaatgtaatagtttaggttttgttttagaggggatagtcgaaattcaaagaatataccttagcggaaaacaaataattctaaagagactaagtaatggagatgtatttggtgaggcattagtattctcaaagaaatcaaaatatccatctacagttatagcttttagtgactgtaatatactttatataagcagagcagacatactaaaattatgtacaagtgatgaaagagtattagggaactttatgtcttcattgagtaataagatatttatgttaaattcaaagataaaaagtatagcttttaaaagcatcaaacataaagttataaattacatattagaacaggcaaagagccaaaaaagtgaaatagttaaactgaaagaaaataaagaagaaattgcatcttcactaggtattcctagaccatctttatcaagagaattaatgaatcttagagatctaaattatattgagtttgatagaaatataattaaaattttaaatattgaagagttagaagcagaattatttgattaaaatgatatatattgatatttcataaggcagaggtatacgtagaaatcattaatataaaataattttattataatagaataattaggttagcttactatcgcaaatattattttattaagtttatagtaagtaattaggagttatttatgaaaaatatttctgaagaacagttagaggagttagaaatttttaatagtgtttctaaatcatctttaagtaagcttaaggattttggagaagttaaaaagtatcagcctggaaatcatctttttagagataaagaagaagtatctactttatatgtagtattaagcggaagtatatctctatataaattaaatgagaatggaaataaacgtgttatattcattttgggtagaggtaaaatgattaatgatgttattatacaagatttaccgtcgtctataaattgtgagatatttgaagagtcttacatattaagttatgataaatatacatttttaaagattatggaggatgattttatccttaccaagaatgttatgttctcattagctatgaaagtaagaagattgtataggcagctaaagaatgcaacaggtgtagtaagaatggaaaagaaacttgcggcaaaactttggaaacttagcagagattatggagttaagtgtgaggatggagtaactattaatatgaatataagtgtaacatatctagcagatttacttggctcaaaaagagaaactgtatccagatcactaaaaatacttttggacaataaattaattaagtatgagaataaaaaaatcaaagtaattgatcaagataaattatcaaaattttttaaagcaccgtgatttatatcacggtgctttatttattaataacttataattaatttataggtaaacgtatatatgaaaggggaatttatagtatgttttgtgaagaatttaacagtgtaattatggcagccaaggcaaaagttaatttattaaagacaaataaactaggatatttcataagttcaatgcttgcaggtctttatgtgggtatgggaattatgcttatattcacaataggaggattattaggtggtagtggatcacctgctacaaaaatagtcatgggagtatcctttggagttgcccttagtttagtaattatggcaggatcagaactttttacaggaaacaactttattatgacagctgcttctttaagaaaagaagtgaagtggacagacactattaacatatggatagtttgttttataggaaatttagttggttctattattgcaggatatttattttatgctacaggacttacagctggacccgttggagaatttattgcaaaaacatcagcagctaaaatgagtgtaccatttttaccattattagtacgtgggattttttgtaatatactagtctgcttagctacatggtgtagttttaaattaaaaagtgaatcagctaagcttattatgatattttggtgtttatttgcatttataacagcaggttttgaacatagtgttgccaatatgactcttttgacaataggattacttaatccgggagctgcaagtgtaagcattatgggttatgtgtataacataggtgtagtaacacttggaaatatgattggtggagcagtatttctagcactaccttattatataatttcaaaaaagaagtaaaggagtaagctgatgggatataaattaagcaaaaatgatattaataaagtattcgaatatttatcaaaagaatatgtagtatatgcaccaaaattatttgaaggtgaaggtagtttctctgatactgatagagtacgttatggtgaaataaaaacaatagatgatatagtttttgatcaaaaagcccaatattcatataaggaagtattacttcctatatctcaaacacttttctatttcacagaagattccataaaggaagcagatgctcctaaaaaaggtgctatcattttcttaagaagctgtgacttacatgcggtaaaacgtatggatgacatttatttaagaaatggacaagaagattattattataagagaataagagaaaatgcaaaatttattttaataggatgtgaaaactcatttgaaaattgtttttgtgtaagtatggaaacaaataaaaatgatgaatataatgcatacttaaaagtaaatggagataatgtatatgtagatgctaaagatgaggagttaggaaagctatttaaggttgatgaaactttagatgttaaaccagactttgtaacggaaaacagtgtaaaggtttggatactagataatctttctttagatgttatgaaatcagatatgtggaaagagtacagtgctcgttgtattgcttgcggaagatgtaattttgtttgtcctacatgtacttgctttacaatgcaggatgtcttctatactgataatggtaaagcaggtgaaagacgaagagtatgggcatcttgccatgtagatggatatacaaatatggctggaggacatagttttaggttagataaagggcaacgtatgcgttttaaagtactacacaaagtatatgactataaaaagaaatggggatatcatatgtgtgtgggatgtggaagatgtgatgatatctgcccagaatatatatcattctctaactgtgtgaacaaattaaaagatggtatgaaagaggtggcagacaatgagtaaaaatgaatatattccttttttatcggaaattaaagaagtaattaaacatacagaaatagaatatacttttcgaatggagtttaatggtgatgtaaaaccaggacagttctttgaagtttcattaccaaagtttggtgaagcgcctatttcagtaagtggtattgaagacggtactgtagacttaactataagacgtgttggaaaagtaactaatgaaatatttaataattatgttggcgataaattatttctaagaggaccttatggtaatggctttgatattgaaaattacaaaggaaaagaattaatagttgttgcagggggaacaggtctttctccagtaagaggagttgtagattactttgcaaaaaatgcaggtgaagcagaaagctttactctaattgcaggatttaaatctcctaatgacgttttattcaaagatgatattaaaatgtggaaaagtaatataaatcttattctaactgttgataatgcagaagaaggatacaatggcaatgttggaatggtaacaaaatatattcctgatttactaataaagaatattaataatgcagcagttattgtagtaggacctcctattatgatgaagtttactgttgcagagtttttaaaacgtggtatagatgaaaataatatttggatttcacaagaaagaaaaatgtgttgtggaatcggaaagtgtggacactgtaaaatagatgatacttatatttgtttagatggtcctgttttcaattattcaaaaggcaaattcttaatagattaggaggggttagttgtggatttaaatacaaaggcaatcaagaaaaatgcttttagagtcactaaaaaaagagggataactgcctctagaattagagttcctggggggcatttagatgcggaattattaggaatgatacaagaaatatcacaaaagtatggtgatggaactgttcatataacaacacgtcaaggttttgaagtaccaggtataagctttgaggatatggataaagtaaatgaattgttacaaccaattattgaaaaattagaaataaatcaagaaataccaggcaaaggatatactgctgcaggaactagaaatgtatcggcatgtgttggaaacaatgtttgtccgtttgctaattataatacaactaattttgcaaagaaaatagaaaaagctattttcccaaatgatttacattttaaaatcgcattaacaggatgtcctaatgattgtattaaagcaagaacacatgactttgggataattggaatgacagaaccacaatataatattgatagatgtgtaagctgcatggcatgtgtgaaagcttgtaagaaaaaatcagtaggagcacttgaagccattaactataaaatcgtaagaaataaagaaaaatgtattggttgtggtgaatgtgcaaatgcgtgtcctactggggcatggacaagaagtaaagaaaaatattataagttagttcttatgggaagatcaggtaagaagaaccctcgtcttgctgaagatttcttaatttgggctgatgagcaaagtataattaaaataatattaaatacttataaatttgttgaggaatatatagacaaagatgctccaggtggaaaagagcatattggttatataattgatagagttggatttgaagaatataaaaagtgggctctagagggaatagaattcccagaaaaaactattatcaaagaacgtatttattggagtggaatacatttctgctagaattaaatgtattgcgaatcgtctgaaatataaaaatacttgcagtatagtataattttaatttactgccagacaatcgaatgggaatatatgtgtttactctgtttcctagaagattttactggattattctaagattataagttgcatccaaaatgcttgcttcaaagactacgcttttgaacaagcatatttggaacaacttataatctagaataacggccagcaaaatcttcttatgaacactctgtaaaaacatatattactattctttgtttagtagtaagtttaaattaagaatatattaatgcaagtatttttatatttatcagattagtaatacctttgatagagattatttacaatcactaatacagtttgtacccttataatacacaaatatataacttttgaagataaatctgtgaaatacttaaagtgatagtaaaacaaagaaatagaatacatatatgtgcagcaggcattgaaaaatgagctgatggtatgtcttaatgggatattgttccgttttgcttgtccaaaatgaattttggagcatgcataaatggatacaaactcctatttagacatacccagcgaagtttttctagtcctgcgaaacatatatgtattctatttcggttggttaccacttcactttaagttcgtcacaatacctttaaattgtgatgacttagagtatatatgaattctaggttatttttatgtatttataaaaataattccaaaagatttctgagtcgtaacaaatgaaacagagtattttataatttcaatgtaaaataggttcataaggtgattcgagggaatgtacctaactgatatagaaatttataaaaatttatttgataaaaattaagtgtgtggaggagatttcaatatggataataaaatgttttgttttcaatgtcaagaagcagcaggatgtacaggatgtactgtaaaaggtgtgtgtggtaagactccagaccttgctaaaatgcaggatttattaatatacgtgactagaggtttatcagaagttgcaacaaaagctagagaagaaggtatcgttgtatcacaagctattaatactacagtaacaatgaatcttttcactactataactaatgctaactttgataaagaagtattttatggaagagtaaaagatactttaaaaataaaagaagaattattaggaaaattagctaacaaagaaagcttaagtgcagctgcgttatataatgcagaaacaagagaagaaatggaagctaaagcagagactgttggtgtattagctactgaaaatgaagacatcagaagtttaagagaacttattacttatggattaaaaggtttatctgcatacatgaaacatgcaaatgctttaggatatgaagatgaaaatatatgtgcatttatgcaaaaagcattatcattaactgctaataacaacgtaacaatagatgaatatatagcattaactttagaaacaggaaaagttggtgttgatgggatggcgttattagataaagctaatacagaaagttatggtaatccagaaataacaaaagtaaatattggagttggaacaaatccaggaatattaatttcaggacatgacttaaaagacttagaacaactattaattcaaacagaaggaacaggaatagatgtgtatacacattctgaaatgttatcagctcactactatccacatttaaagaaatactcacacttagtaggtaactacggaaatgcatggtggaaacaaccagaagaatttgaaagctttaatggaccaatacttatgactacaaactgtatagttcctccaagagatagttacaaaggaagattatatactactggatcagcaggttatgaaggatgcactcatattgcagctgatgaaaatggaaagaaagatttctctgtaattattgaacaagctaagagatgtgcagtacctactcaaattgaagaaggagaaatagttggtggatttgctcataaccaagtattagctttagctgataaagtagttgatgcagtaaaaactggagcaattaagaaattctttgttatggcaggatgcgatggtagacaaaaagctagatcatactacacagattttgctgcagcgcttccaaaggatactgttatcttaacagctgggtgtgcaaaatataaatataacaaattagatttaggagatattggtggaattccaagagttttagatgcaggacaatgtaatgattcatattcattagcagtaattgcactaaaattaaaagaagtatttggtcttgaagatataaatgaattaccaatagcatttaacattgcttggtatgaacaaaaagctgtaatagttttattatctctattacacttaggagtaaaaaacattcacttaggaccaactcttccagcattcctttcaccaaatgtagctaatgttttagtagaaaactttggtataggtggaattacaaatgttgaagatgatatggcaatgttcttaagataaattaatataagataaataatagaagaagatagctggtatgaaactagttatcttctttctttttatttaaaatacagtaagtagtaaagacaaaatcgtactgtcgaaaaatatttaaaaataaagttgtattgaaaacgtatttataaaaataaatatatttacatcaataatatatagatatataatctgtatgttgtaatagcaggtaataaaaaaggaggagaaaatcctttttattacctgttaaataaatttgaaattgcataataatttttacaatatgggggaagaattatgtttaaaaaaattcaatcattattgattggaagagctcttaaaactaacgaattagctgaagaaaaatttagtgttatttgggggctgccaatattatcaagtgatgctatttcatcggtagcttatgcaagtgaagaaatactattagttcttatacctattcttggtatgcgtgcatatggatccatgatagaaatagcaatagcaattacagttttattaggaataatagtgttttcatatagacaaataatcgataattttcctcatgggggcggatcgtatattgttgcgagcgaaaatataggtaagcttccaggattggtggcagcgtcatcattaataattgattatttattaactgttgcagttagtacctgtgcaggagcagctgcaataacatcagcgattccagccttgttgccgtatcaaccgttaatagctatttttgtaatagggttaataacattagggaatcttagaggaataagggattcatctaagttatttggaataccaacatatttatttatattatcaataataataatgataataacaggagtattcaaagtattagtgttgaaagaaagtccagagcaattatatgtagttccacaagcagctggagatttaactttgttattattcctaaaggccttttcttcaggatgtactgctttgacaggtatcgaagcggtaagtgatggaatacctaattttaaaaatccagctcagaagaatgcgaaaatagtattaggaacattagcttgtattgtttttattatatttggtgggatatcatacctttcaacaatgtacaaagcagttccaggtcaagatattacagtaatagcacaaatagcgatccaagtttttggacaaaacagtttaatgttttttatagtacaagctacgacagctattattcttacacttgcagctaatactgcattttcagatttgccgctactgttatcaatattagctaaggatggatatgttccaagacaacttgggaaaaggggaactagattaagtttttcaaatggaatagtattgttatttctagtatcctcacttttagtttatattgcagatggtagtactcatatgttgttatctttatatgcggttggtgtatttatatcattcacattatcacaatttggaatgtttagaaaatggactaagagcaaggaagggcattggagacataaagcgtttataaatgggttaggggcagctgttacagcagcaacatgcataataataggtgtagagaagtttaagcatggagcatggattgtgcttgtatgcataccgatacttgtaacaggaatgttaagagttagaagacactatactaaagttagagagaacttaaaaatagaaacaggtttagagagtttaattgtaagagaagcaataacaaaacatgttattgtgccagttcaaacaattaataaatctttcattaagagtttaaattgcgctttaactcttggggagaacatagaagtttatcatgttagtacagatgaagaagtcacaaagaaactaatagaaaagtataataagcttgggatagcagctcaattggtcatagaaaatgcgccatacagaaatgttaacgaaaaacttttagcgtatgtggaagaaaaacataagcacttaaagaaacacgaagtaataacaatagtaatgcctcaatttattatacataaatggtggcatcagacacttcataatcaaacatcaatacttttaagaagatctatacttaagatgagaaatgtagttattgtaactgtgccttatataattaatgaataggatcatataatatagaaaggagagtacctcaaaaatatttgaggtactcttcttatttccagagaaatataatatttaaagctaaaatagaaagtacaagtaaaagttaaacttaaaaattatgatcttactttttgttactatttatcagagaagtctaaatcaactttatctaaaggaataactttagtcttattctttattttataacctacgtataagattaagaataatggaagtcctatataagctgcaattaatccattccaatcaatcgcctcaggagtaatgtatgaatatccttgacctattattataataatacacattaataatgctaatattggaccaaatggatataaactagccctatattttaactcatttaaatcccttccttgataaacatatgctttcctaaatctatagtggcatattgctatacctacccaagctataaatccagcaagaccagatgctgcaactagccaaacataaacagtactctctgcatatagacctgttaaaaagcaagcagaagctattaatgtagttagaagtacggcatttataggtacacctctattatttgttttagcaaaagctttaggagccataccttctttagccattgcataaagcattctacttgatgcatacataccagagttaccagcagataatacagaagttaatatgatcgcattaatcagtgaagcagcacctgcaataccagctttttcaaataccattgtaaatgggcttgtatcaagtccagcttcagtaaatggtattattgctcctaggacaataatcgtacctaggtaaaatattaatattctccaaaatattgattttatagcttttggaatattcttctcagaatcttcgctttcacctgcagcaattccaataagttcagtaccttgaaatgaaaaacctgcaattaagaaaatagaaaatattgatttaattcctccatggaagggtccatcttcaatggtgaagttatgaaatcctattttatctccacccattatgcctacaatcattaaaacaccaattactatgaatataagaacggtaaccaccttaataccagcaaaccagtattctgattctccatatgctctagatgataaaatatttaagcctactataattactaaaaataaaatactccaatatagggcatttacatctggaaaccagtatttcatcaacagagcaccggcaaccatttcggctgcaattgttatagcccagttgtaccagtagttccagccaagggcaaatccaagagctggatcaataaatttattagcatatgagctaaatgaaccagatattggcatatgagttgccatttctcctaagcttgtcattaaaaagtataccattatacctactagtgcataagctactaatgcaccaccaggaccagcttggtggagagtatcacccattgcaaggaatataccggtaccaatagatccgcctatggctatcatgtttaagtgtcttgcttttaaacttctctttaattcgtgattttcttcactcatttttctatcctccattatggttttaaatttccataagcaagtaactaagataatataaaaattaaaacaataaaaaaagccatgagagcatactcatgacataaatacgaaagttacacattttaaaaatatgacgaatatcgacatttacattaaaaatagctctccacaaaataagttgtggcagtcttgtatatattttacacaagcccagcaaatagtattaaagcaatcagctatttacttcggcgaaagttcctttcttattacttcaatgagcttacctccataataatactcttaaatttcgcgcctctatcttagttatttacctattaagttatatgtaattatgtaataaaatgaggaataagtcaatataaaatatttaacaatttataaaaatgcatagaaaatgactaaaaaatttgcatattaaaagcgactatcgaaaattatttcaatagtcgcttttttaatatttataaataaatatactatcttggtaagtattagtgtttgtatttagctttttatacaagttggcactatactaagattatatatttaaaatagcattttttattctaaatttaatttattttttaatatatagcttgttattatgaaataaactattatgaagattatattaaatactgtgatagatattaaaaataaattaataggccaaagagattcaatatttcttagtaaatcaggcagtctagaggatgaaaaagctatcccaatagatgaggatattgcacctgcaattaaatttaatattataaatgccccgaaagatgaaagaattctatgcttactaaatatatgcccaattgatatagaagcataaatcatactaataaattttacaaactgaaatatcatagcaattaataattctataataattacataaatttgtattcctattttagcataaccttctgaaagagccctaaaagtttcagaaaagaattgaccaaaagccctagggtcaaatgccataataattattgaaagtatggctataattccacttattatagtccaaaaagtggcaattgaaagtttgcttgtaatgtttgtgatggtgctcactggaagggtgttcattaaatatccttcatcaccaagcagatttttataaaatctttggataattatgaaaaaggtgactatgaatacagcagccatagtacatccgtatccaaagatgcttagtataaatgggattgaaccaaatccttgaagtttatgggatagaccagttccgataaaaattttattaatgatagcaaatgctaataatactaaatatagcggtataagggttctgccagttgcttttacctcatacttcattaattttcctaacatctaaatacctccctaaatagagcatcaacactcttgccttcattttctcttatttcatcaacacttttagttaagaatatatttccatatgatataaatactacatcatctaatattctttcaatgtcagaaataaggtgagtagatataattatagtggcattttcattgtaattagtgattattgtatttaaaatataatctctggcagcaggatcaacacctgcgataggttcatctaataaatataaatcggcctctctactcataactaaaataagttgaactttctcttttgtaccctttgacatagtttttaatttatcgttaggattaatgttaagttttgataacatattgtaagctttctcaggattgaaattatcgtagaagtcttgaaaaaagctaataatgtctgaaactttcatccagtcattaagataagtcctttctggaagatatgaaacaattttctttgtttcaattccaggtttatttcctgatattaatatttctccatttgatggagttaaaagaccatttgccaactttattagtgtgcttttaccactgccatttggacctaaaagtccaacaattctgccacgattaatttttagatttatccctttcaatgcctctgtattagaataagtcttaaataaatttttgcattctaaaatagggacattatccatattgctatttgtaaaagtagacattgtatcactttcgctagagttatacaatattttattatcagcattacccattatttcatctcctttgatataatttctataagttggattgtctcttgattggtataaccgattttttccatgttgtgaagaaatttttcaatttgatctcttgctaaaccatttcttatatttttaatcatattaacgtcctccgtaataaatctgccactagttctttgagaaaatactaaaccagttctctcaagttctgttaatgctttctgcattgtattaggattaacagctgcatcacctgccatatctctaactgatggcaatttttcaccagctttgtatatgccagaaacgattctaagttgtatttgttccattagctgcatgtaaattggtctatcgtcattaaaatcccatgacatagtctcactccttcgtaaattgtactactgtattgttgtactaagttgttaatacaataatacaactataacttttagctgtcaagaaaaataaaatgattttttgtaggttaaataaggcaatgaaatctgttgaatattaaaaattgtggtgttataattattttcaatggtgtatatacacctgtaaaattaattaaaagaggtgtaaataaacatggcgatggatttagcaaaagaaatattaaagttaaagagagaaaagaatgcacttattcttgcacactattaccaaccaggaattatacaagacttagcagattatgtaggagattcttattatttaagtgaaatagctagagattgcaaagaggaagttataatgttttgcggggttaaatttatggcagagagtgcaaaagttttatcaccgaataagactgttttaatgccatgtcctagtgcaggatgttctatggcagatatggcaagcggcaaggctttattagaattaaaggaaaaacatccagatgcatatgtagtttgctatataaattcaacgtgtaatgtgaaagctcattgtgatgtagctgtgacttcttcaagtgcattgaaaatattaaagaagatacctaataaaaagattatgtttttacctgataggaatctaggtgaatatatatcggagtttttcccagaaaaagagttcatattatgggatggattttgtaggtgccataataaggtaagcagagaagatatattgattgaaaaagaaaaacatataaatgcaaaagtattagtccatcctgaatgcacaaaggaaatcagagatattgcagattatatagggagtacaagtggaataatagattatgcgactaaagatgaaggaaccgattttataatagcgacagaagaagggattttacatgaattaaagaaaaagaatcctaataaaaatttctttataccaggagataaaatatgttgccaagacatgaaaaagacaacctttgaaaatttgtatgatgccttattaaatatgaaaaatgaaatgattatagaagaaaatgttagaaaaaaggcgttaagatcgttagaaaatatgcatttacttgcatcgcaagatgttagaagtaattaggaaaaatatgaataagtttgttgatgttctaataataggttcaggggtatcaggtctttattgtggattaaatttaaggaaagatttaaatgtcttgattgtatgcaaagataagattacttgtagtaacacttatctggcacaagggggaatatctgttgcaaaaggtgttgaggatattccactgtatatagaggatactttaaaagcaggaagatacaaaaatgatttggaggctgttgaaactttaattaatgaatctatggttaacgtagaatcattgattgaaatgggaattgcttttgatagaaatgaagatggaagtttaaactttacaaaagaaggcgctcattctgtaaataggatagtccatacaaaggataatacaggagaaagtgctgcaaaaattttaattgataaagtgaaaaagagagaaaatataagtgtttatgaaaatactcattttgtagatattatagaaaaagaaaataattgcattggagccatgttaataagagaagatgagcaaataaatgtttatgcaaaagctgttgtattggcaactggaggcataggtggattatttaataattcaactaatcagagaatattgacaggagatggaatagcatcagcaataagacacggtatagaattaaaggatatggattatattcaaattcatccgacagcattttatgaagaaggtgaaaataagaggaaatttttgatatcagaatctctaagaggggaaggtggaattcttacaaatataaaaggggaaagattcataaatgagcttttgccgagggatgtggtatcagaagcagtatataatcagataaaagagacagaagtgccttatgtaaatttagatataaggtttttgggaaaagattatatcataaatagattttcaaccatttatgaggaatgcttaaaaagaggaacagatataacaaaagaatgtattaaggtttctccagctcagcatttttttatgggaggaataaaagtagatttggattctaaaacatctatgaaaaacttatatgcagttggagagacaagctgtacaggagtacatggtgctaacagactcgcaagtaattcattacttgaaggacttgtattttcaagaagagctgcaatatcaattaacaatattgtggattatttggaaattaaagtttttcctgtggagagattagaaaaatcatgggatgaattacaagaagaaaataaagagatgactgttagaactataaaagaaaagggtggaaagttagatgataaattatttagttatagataaaataataaaagatgcacttattgaagattgtccaagcggtgacataaccacaaattcaattataggagaagaaagtatctctacagtagaattaatttgcaaggaagaaggcatagttgcaggccttgaagtatttaaaagagtatttgatttattaggaaatgtggagatcgaattttataagcgtgatggagataatgcacatgtaaaagacagagttgcttttctaaaaggtaatacgagaagcttattagttggggaaaggattgctctaaatttacttcaaaggatgagtggaatagctacattaacgaatagatttatacaagaaataaaacacacaaatgcaaaattattagatacaagaaaaacaacaccaaatttaaggatattagagaaatattctgtaaagattggaggtggatgtaatcatagatttaatttatctgatggtataatgattaaagacaatcatattagtgcggctggtggaataaaaagggctatagagctaactagaaaaaattcttcatttgttagaaaaatagaggtagaaactgaaaatttagaaatggtacaggaagcactattagcaggcgcagatataataatgcttgacaatatgagtctagagatagctaaagaagcagttgaaataataggaaaaagagccttaatagaattctcaggaaatgttgaactaaataatattaaagaaatagctgaaataggtgttgattacatatctgtaggagcattaacacactcagctaaaatattggacttcagtttaaaaaacttaacattgttagaaaattaaaaattgataattaatatttctgtatcaaatgaaacggattttatatgaacattctattataataattctataagttaattgatttatttaaatgctatatttcaattattaatgtatggtcaaaaattaatgattagtgaatttaaatgagtatgaaatgtaggaggagaattttatgataagaagagttattaaaatagatgaagagaaatgtaacggatgtggtgtttgtgcaagtgcctgtcatgaaggagctataggtatagtagatggaaaggcaaaattattaagggatgattattgtgacgggcttggagattgtcttccttcatgtgaaactaatgctatttctttcgaagagagagaagcagctgcttatgatgaagaagctgtaaagataaacatggagaaaagaaatactgagcaaaagaaattagagttaaacaagaatcaaacaattcaatttggatgcccaggtgcacaagctagaatgttaaaccataagaagattgaagtgaaggatgcgagaactgagggtgagatagtatcacaattgaatcaatggcctgtgcaaattaaacttgtttctcccaatgcagcatattttaataatgctaatttacttatagcagcagattgtacagcctatgcatatggagattttcataataagtttattagaaacaaaattacattaataggatgtccaaaactagatgagggagattattcagaaaaactaacgacaattttgaagatgaatgatataaaaagtgttactgttgtaagaatggaagttccatgttgtggtggaatagaaaatgctgtgaaaaatgcattaaaggcaagtgataaaatgattccttggcaagtagtaactatttctactaatggagaaattatcgaataaaaatataaataaaataagggtatatttgcatatataaaaagttttatatgtagatatgccctataaatttataaaaatgattatttcagggtatacttaaattagaaatgggaatttatatagataagtaaaaaattatatattcattaaggtgaaatagaggatattattgctaatgtgtagaatactataatatcgagatatttaagggggagtatacatgaataaaaggaaagtgttaataccaatagacggaacagaaagaagtatgcattctttagaatttgtaaaagaaatatttcccgataaagattcaattgaaattataataatgaatgttaaagaattagtactgataaatgaaatgatagttgctgatgagataaaatttgcacaagaattgggtgaagaaatattacaagcagctaaagaaaaaatgaaagattataagacagaaacttattttacttttggatatccaggagatgaaataataaagaaagcaaatgaagaaaatataggagtaatcgttatgactaaatctactaaaagaggtttaaatcgaatgattggctcagtaactactaatgttgtcaaacgtgccaaatgtattgtaatgatagtgcctaatgatttttcaattagtattaaataagcaagttaatcagtaggtttgaaaattagaattttataggctatcttaaaaattgcattttaaggtagtctttatttttgaatatagaattttactatgtataatgatataataaagcgaaacttatttgttataatataagtatttatggaacattaagttaaagatttatattaaataataattttaaggtggaatttattttagcttatattaatacatgcggttagttcataattttcagataagggatgagaattttgaattgatataaattatataaaaattattttgttatatttaaggagtaagaaatgagagcagtttatagaaatccaagagaattagcaacatgtttaaaggacattgtggatacatattatgatgacctaatttcatatgaaaagatggaagaaagaattatgaagatagttgatgctaatagagaagctatatataaagaaaaaaatatgtcagttaagatagctaatgtcttaggagataaaagagtagatgtaattaataaagtagttgaaagtaaaactaagtcagaagtttaatgagttttgcggtttaggagtgaatttggaatgggtaagaaagtaatattaacaggagatagaccaacaggtaaattacatataggacactatataggttctttaaaaaatagagttgtacttcaagaatcaggcttatatgaaagttttataatgattgcggatcagcaggctttaacagataatgcaagaaatcctgaaaagataagaaatagtttaacagaagttgcactcgattatttagcagttggaattgatccaagcaaatcaaatatatttgtacaatcacaaataccagaactaaatgaattaacaatgcattacttaaatcttgttactttatcaaggttagaaagaaatccaacagttaagcaagaaataaaacagaaaaattttgaaaatagtattccggcaggttttcttatttatccagtaagtcaagcggctgatattacagcatttaaagcagacacagtaccagttggagaagatcaactgcctatgattgagcaaacaagggaaatcgttagaagttttaactctatatatggagaagttctagttgagccagaagcagtacttccaagttctaatgcgggaagattacctggaactgatggaaaagctaaaatgagtaaatcaataggaaattgtatatatctatctgatgatgctgatacaattaagaaaaaagtaatgtcaatgtatacagatcctaatcatataagagtagaagatccagggcaagtagaaggaaatactgtatttacttatctagatgtatttgcaactgataaaaatgctgttgaagaaatgaaagagcattataagcgtggtggtcttggtgatgtaaaagtaaaaaaatatttaaatgaaattttacaagctgaattggaaccaataagaaatagaagaattgagtttgaaaaagatatagatgcggtatataaaatgctaaaggatggtagcaacaaggctagagaagtggcagctaatactcttagagaagttcgagaagcaatagggatagaatattttactggaaaataataaagtaaattcattagagggggaattcaaaatgaaagctattggaatattaaattatccagtagaagatgtgttccatatttttataaaaaatgcaaagaaagatttttcggattttaacgaagaagatgcgacaggatgtaagattcaaaagagcataaatactggtagacctaatccagtagaatgtacagttgaaataacaggctatgcaaaaaatgaaaaatatcaaattactacctcaactgattttacaacatgtgtatccacatataatttcaaagggcaaaaagatggcacaaccaaattagtatttgaagaagaacagtcaacagataaattttttggatatatgtcattatggattcaaagatttatggctaggcgcgcctttaaggcaaagtataataatattgtagaggctctcaataatgaattgaagacatatgctaataataaagaacgaagcaagcctaaaaataaataataaaaatacagggttgtaaaatcaatcctgtatttttattttattaaaaaatattaaacccaattaccattattaaaaattttaatttcttcaccagctggtgtaataccagttatatttgtatctttagttcctatcataaaatcaacatgtatcaacgatacatttgaaccagatagaattgattcttctcttgtcattttttctccgttctttatgcagcaaggatatgaagaaccaagagctaaatggcatgaagcattttcatcatataatgtattataaaaaattatatttgaatttgaaattggagaattatatggaactaaggcaacctcacctagatatcttgaaccttcgtctgtattaagaagctcagttaaaatatctaatccagtttcagcagaacaagctacaactttaccatttttaaatgttaatgaaaaattgtttattaaatttccacaatagcttaaaggctttgaactaaaaacaattccgtttacgtcatccaatttaggggtagtataaacttcttctgtaggcatattagcaataaatctcagaccatcttgcgttatatcctcacccccgcaccaaatatgatcttgaactaatcctatttttaaatcagttccaagagaatttgtaaaatgaagatatttaaatttataggaatttaattctaataccttatcatgaagaagtttagtgtgcttattccatgcatctataggatcggattctttaagtctcataacagtaaaaattgcatcccataatttttcgattgcttcagatgagttagattcactaaagactttttttgcccagttttcagttggaattgaaactatgcaccaagcatttttgttggaagtacatgcactatgatatttctctaaggctgcacgtctgcctttttggtatgccgatattttatccgaatctacatctttaaaaatatctggatcagacgcggaaatactcaaaaatgctgcattgttttctacgtaatagtcatatttatctttttcaaattttggcgtaatagaaagaatttcctttgaagaattattaaatcgtatcttattgaatttttcatcattataatttataactacatcagaagcaccatatttataggcttcatctgcaagtagtcttgcaaagttactacactcaatagggctatttataactaaaagtccatctttttgtatatttacacctttgataatagcaagtttagcatatttagataaaaggttatctaacaattatatcacctcatcacataatagatttttatagtactggttaatttaaaatactttgcatttggaattacgatctataattaacattataacaatttttgcaagttatctactatagtaaaataaagaatatacaaaataagaattattactaataattatggaaataatatgagataaattcattacacaacaagatacatgtatactttaagttatacaatatagtataatgagtttaaataatgacttgaagtagataataatatttctagttgagtaaatttttatgttaaatttcaggaggtttttaatgaaaaaattattgattttagactcaaattcacttatgaatagggctttttatgctttgcctcctcttacaaatagtgatggaataaatactaatgccatttatggttttataaatatgctacttaaaatgaaggatgaaattaatccagatagtataattgctacttttgatttgaaagcaccaacttttagacataaagagtattccgaatataaagcaggtaggaataagatgccgccagaacttgcggaacaattcccgattattaaagaactatttaagttaatgggaattaagatatttgaagttgaaggctttgaggcagatgatttgattggaacggtgtcaaaatttgctgaggacaataatgcagaagtatttgtagttacaggagatcgtgatgcacttcaactagcatcagaaaaaactaaaattataattactaagaaaggtgtcagtgaaactgctgtttatgataaagaaagctttatggatgaatttgaagtgactccagagcaatttatagatgtaaaaggattaatgggagataagtcagataatataccaggcgttccaggagtgggagaaaagactgcttttaagcttataaaggaatatggatctgttgaaaaagttattaaaaatatagataaaatttccgggaaaaaacttaaggaaaatttagaaaataatgttgaacaagcaatattttctaagaaattagctacaattatgagagaagttccaatcgaattaaatttagaagatataagttctaataataaagaaaatatattagaaattaagaagatgctcattaaacttgaaatgaagtcaatactatctaaatttaaagatgacacagttcatgaagaatctaacattgaagtgagaaatattactacaattgaagatatgaaagaattattttcggagatgagaaatagaatttatatagattatactttaactgatgcatctagatattctaaattaaaacttgaatatttaatattaggggaagaaaataagggtactattatagatttcaaagacataagttctaaggatagtgaagaagctttaaaagttttgaaaaatcttatggaagatgataatgttaaaaaagttattcatgatggaaaaaactttgttacatttttaaataaaaatcaaattgaaataaagggatttgattttgatactgcgatagcagcttatttaattgattcatcaaagagtaaatatgaaattctagaacttgttaatcattatattggtgataatcctaacagtgaaggcagtaatattaaggcaattctttgcagttacttacctatggtttatgaaaaattaaaagaaaatcttcataaggaaaatatggatcaactttattatgaagtggagcatccattaatttatgtgctttcatccatggagagtattggatttaacataaatcaaggtatgttagatgagctacagacgaagtttaaaaaagaaattgataagacacaaaaagaaatatatgaattagcggatgaggaatttaatattagttctcctaaacaattaggcaaaatattatttgaaaaattggatttaccagtcattaagaaaacaaaaactggatattcaactaaccaagaagttttagagaagctaatgaataagcatgatataatacctaaaataatgtattataggcaaatcacaaagataaattctacatatgtagaaggtttaaaaaatgtggttgatgaagatgggcgtatccattcaaacttcaatcaaactgtaactacaacaggaagactatcaagcacagaacctaatttgcaaaatattcctataaaatatgaaatgggtagagaaataagaaaagtatttataccaatggaagaaactgatatactggtttcatgtgactattcgcaaatagaattaagggtattggctcatattgctggagatgaaaatatgatagatgcatttgagcatcatagtgatattcacacaaaaacggcttcggaagtatttaaagttccgataggagaggttacttctcttatgagaagtagagcaaaagcagttaattttgggatagtgtatgggataagtgcgtttagtcttgcagaagatttaaagatcacaaagaaagaagcagaagaatacatgtctatatatttagaaagatatcctaagataaaagaatatcttgaaaatgttgtagatgaagctaaagaaaagggatatgtattgacaattttaaatagaagaagatttattccagagataaaatcttcaaataaaatagttaaggctttgggtgatagattggcaatgaatgcaccaattcaaggaagtgcagctgatataataaagcttgcgatggttaatgtttataataaattaaatgaaaaagaattaaaaagtgaattaatccttcaagtacacgatgaacttattttaaatgtaaaaaaagatgaatttgaagaagttaaaaatttagttgcttatgaaatggaaaatgcaattaagttaaaagtagcacttgatgtggatgttaattttggagatacatggtacgatgccaaataatgtattgtggaattaaaaaaggtggtttttataaaatggttaaaattggtttaacaggtggaatcggcaccggaaaaagcactgtatcaaatattttaagtaaagaaggactaaaaataatagatgcagattctatagctaaagaagtacttgaaaataatccaaagatattagaaatggttcgggcacaatttggagcaggtttctttgactggagaggtgaatttagaaggaaagaatttggaaaccacatattcagatttcctaaacaaagaataaaatatgaaagtataattatgccgtatattaaacaatcaattgaagaaaagataaaattgtacgaacaaaagaatgaaaaaatagtaataatagatgctcctactttaattgaaaataatatgcatgaggaaatggattatattgtacttgtatatgcggataattcagttcaaattcaaagggttatgaatagagataaattaactaaagttgaaactgttagtagaataaattctcaaatgtctatggaagaaaaaaaagagtttgcgaatattattattgacaataatactgatttaattgaattgcagaagcaagtttatgattttattgattttataaaactaatatgctaagtaaggagaatataatgaagtttctaagaaaaaccttttgtgcaatagtattcttagtagtaattgtagcagcaattggcataggttcgagatatattataaaagaaaagttttttccttataagtaccagcagtatgttgatatgtacagttcgcagtataatctagatccattgctagtactagcagttataaaaactgaaagtaaatttgatgatgatgcgcattcacataaaaatgccgtaggtcttatgcaaataacggttgatactggacaatgggcagcgaaagaaatgggatataatacattctctaaagaagacctgtataatgaagaatataatattaaaatgggatgctggtaccttaggcgtttgaatgatacttttgataaagatatggatttgacaattgcagcgtacaatgcaggaccaactaatgtacaatcatggcttgataatagaaaatactcttcagatggaaaaagtgtagattatataccttttggggaaacaaaaaaatatgttgataaggtaaacacatattatcatatatatcaatatctttatgataaaaaagacgattattttgaggcagataaggtagttgatctaatgaaaagcttcctaaatgtacattttttaagttaattattagtctctgcctaatgattaacttaaatattttatgaaaattacttgaattttaaataagaatagattatcattaagtgagtaatttatatttgcaggtgtggtggaatggcagacacgctatcttgagggggtagtgttcacatggacgtacgggttcaagtcccgtcacctgcaccaaaattttatgaattttgtcgagtttcatattttagaaacttagtgaagggtttatatatgacacatatttagttatgaaaatagctaaatatgtgttatttttttgaaaaaaatgtgtattaggatacatgaaatattttttgttttaaaatcttacaattgtttataatctcattactatgattaattaaatttctaaaattacaaatagtggagttgggatttgaaaagttttaataaaaattaaggaaataaaaatatagttgttgtaatgaagtgaaaattaaaattttaatgaaattaaaaaggtttttgtaaaaaaccatcgaataagtatttatataatataaatttgttggatatttattatgtgattaaagggggagtgggttttaatgtttaaatcgattaaaggtaaattagtatcacttatatctatgcttattatttcaatggttcttttaagtttgtattcaattaataacttaaatgtgattaatatggtttcagctaatatgtctacagaattaattccaggattaatccaatcagggaatataaacacgatgacatctgattttagaataatagaatatgaacatataatctcaactgacaaaaatgaaatggctcaaaaagaaaaagatatggaagcaaagaataacgaaattcaaagcagtatgaatttatatgaaaaaacattttatgatgataaagataagcaattatttgagacagctaaaaatgattggaatcaatatttgaaaatacatgagaaagttataggcttgagtagagatttaagaactgatgaggccatggaaatcatgaatggagaaggaaagaaatacttcgactcagcatcagaatcattgaatgaattgtctaagtataatcaagaaatgggagcggatttttctaagcagggtagtgatatataccaaaaagtaaagaatatatctataataattatttcagtattaattattttttcaatagttatttcatttatgattatcaaaggaataatagcatcactaaaaagtttaaaggatgagttagatgcacttgcagaaaaaggtggtgacctaactcaagaaattaaagttaaatctaaggatgaaattgctggacttgcaaatagtttaaataaatttatatcaaacttaaggttaataattagtgaggtcaatgagagtactgaaaatgttataaatataaataatgatataaatagtaagatagataatctatcaagtacaatagaagaagtttcaagcagtacagagagtattgctgctggaatggaagaaacagctgcatcatcagaggagatgctagcaacatctcatgaaatcgaaaaagctgtagagggaatatcggaaaaaattcaagatggattaatatcagttgaaggaatacaaaaaagtgcagatgatgttaagaaaaatacgattgagtcacaagaaaaagcaaaggcgatatttttagagacaaaagaaggtcttgaaaaagccattgagaactctcatattgtagctagaattagtatattatctgaatctataatcgagattgccgcacaaacagatttgttggcattgaatgctgctattgaagctgctagagcaggggatgcaggaaaaggatttgcagttgttgcagaagaggtaagaaaacttgcagaagaatctaagaatgtagttactgaaataaagagcgttactgataaagttacagaatctgtaggtgatttatcaagcaattcaagtaagcttttgaaatttatttcaaataacgtagataatgattataaatctatgatggaagttgcagataaatatagcaaggatgcagaatttgttagtagtttagtttcggactttagctcaacttcagaggaacttttggcatctatacaggatattttaaaaacaatagatcaagttgctgaagcttccacagatggagcagaaggaactactgaaatagcagaaaaggtagtcgaaataaatgagaaaactaataaaataatattaaatataaatgaatctaaagagagcacaagtaaattaattaaaaaaatatctacatttaaattttaataaaattaattgctaattttaatttttcatacatagaaggaagaaataagaattgattaactattagtaattttatagcctttagcataatagctaagggcattttctttatttttttatcatacatttcatcttaattgaataggtaaatgtataatagttaatttctccagaatagaaatcaagttttaagtacggaaaataattattgaagaaaaaatgactcttggtcatttttgtgtgatataatctatacaaagaaatatttgctgacaggagcattgaatatgaagaatataataaatatttttaaacgggatatgaagaatatatttactaactgggtggcagcgcttgttgtagtagttttaatgataataccatctttatattcattaataaatattgaggcatcctgggatccatattctaatacaaagggaatagaagttgcaattgttaatgaagataggggaacggtatacaaagaacatagtataaatttaggcgatgaattagttgataagctcaaggaaaatgatcaattaggatgggtatttgtagacaaagaaactgccaaaaatggtttaacaaatgaaaagtattatgcaatgattgaaataccacaagatttttcagaggatgttacgactgtagttaagaaagacgttacaaaacctaagttaatatatactgtaaatgagaagaaaaatgttattgcatctaaaataactgatgcaggtgtaaaaagtgtcaaaactcaattagatgagaatatagcaaagagtatatcgggaataatgttcagattatgtgatgagattggtatagatatacaaaacaatagatctgagcttagaaatataatagattcagtatacaaattagatgataatatgccagaaattgaaaaaatgctaaatgaagcaattaatggaacaataagtgcttctgagttaatgataaaaacaaatgagcttataccaactgcagcagacactgttgatgaaactgctgaatttttaaataatacacaaagttttctaaatgaaacacaaggagatttgcagaatgaatctccaaaagttaaagaagatcttgttgaatgtgaaaatacgctggatattataggaacagagcttaaaaatattgatgaaaatatatcaccagaagtagaaaagaaagcattgttacagatattagacacttctaaagcaattagaactagttctagcgatgctaagtctagattgaagaacataaaaaaagctattgataagattagcgaaatagaaattcctaaaccttcaattgacaactcactacaaagctatgatgaaataaaaaagcttcagcaagtttttgataaacaagcagatgtaattgaaaatcaaagagatttgttaaagcaagagagtaggacaatctctaaaattatagataggttagataatatagataataatcttgataaattaattgatagaactaataaagatattgataaattaaatagtggagataaaatattggacacgcaggatcttacagatactagaaaagtattagatgatttgcataatttagtttctgatataacagataattatgattcagaaattgtaccaacaattaataaggggtttgactcaatgagaaagataattgatactgggttaaacttatcggctcaaggaaaaaaaactttgccagatgttcaagagatgttgaatactttcaagaatacagcagatttatctaatgatgaattaaaaaaattaaaagagaagtttccagatataagagacaatgtacatgagcttgcgcagagacttaagaaaatagataacaagaaagatattgatgaattattagatatgataacaaatgattggaacgctcaaagtgattttttatctagtcctgtagaaattcaggataatagattattcccatggcctaattatggatctacagtaacgccattttatacagttctttgcttatggattgggggatatgtattatcagtcctaattggaacagaggcacattctatagaaaatgataaagaattaaataagtacgagaaatattttggaaggctatcgttatttttattcataggaataggtcaagcgttaatagctagtctaggagcattatttatattgcattcttattcagtacatccaataatgtttgtcttctattgtatatttataagtgttgtatttaattgcataatttacacagctgttagtctttttgggtatggaggaatagtcataggtgtggtattacttgttatacaggttgccggaactagtgggaatttcccaatagaagttaatccgacaggatatcaaaagctatttccatttcttccgtttacctatgcaataagtggagttagacaaattatggcaggagtaatatattcaatattatttaaagatagcattatattatttatgtttatgataggatcaattattattggagttttggctaaagaaccgataaatgcaaaaagaataaatattgttgaaaaattaaaagaaagttcaataatgagtagttaaaataatctatattgcaatattaggggaattaattatgaagaatatatttagaatatataaaagagatatcaataaaatacgtactaattgggtagcaagacttatgattatggtaatgataattattccatctatgtactcattgataaatataaaggcttcatgggacccttattccaatacagctggaattaagattgctattattaatgaggataaagggactgtatttaaggacaagaatataaatttaggagaagatttagttgataaactcaaggaaaatgacaaattaggatgggtttttacagataaggaaaatggggagcaaggtttgctactagaaaagtattatgcaacaattgaaattccagaaaacttttctgaagacattacaacattgttagaaaaaaatattaataaaccaaagttaatatacacagtaaatgaaaagaaaaatgcgattgctcctaaaatgacagattcaggtataaaaacagtaaaaaatgagttagacgaaaatgtaattaagacagtctcaggaatattgtttaggatatgtaacgaaagaggagttgatatacaagacaatagacctaagcttagaaaaatagttgataacatatatgagttagatgataatgtgtcagaaatagaaacacttttagatgatgcaagcaacggaacagttgatttgaaaaatgtgttaactaaaactaatgatatgcttccaacaatatctaatgctattgattcatcaagtgattttttaaataatagtaaatcggttttagatgatactcaaggaaaactatcagacatttctccaacagtaaagcaggacttaataaaatcagaaaatgtacttgataattcgagtgtagaacttaaaaatatagatgagaatgtattaccagaagtatctaaaaaggtgttattaaatataagggattctgctattgcaacagaagaaacaattaataatgttaaatataaacttagaaatataaagaaacttattgataaattaagtgatatagagatcaaaataccttcatttggtgataatgttcctaatatagattcgataaaattaataacagacaaactagataaacaattaaattctgtaaaaaatatgcaagatgatttgaaagatataggtaaaataatttcagataatagtgataagctagatacgattgaagataaactacaaatagtagctgataaatcggatgaagaaattaagaaaatagataatgaaggattaaatgttcaaacacttaaggatattatagaagttgtagatgaagtacatagtttggtggcaaatattacagacaattatgattcagaaattgtctcaggagtagaaaaaagtattaattcaactagaaacgttttagacgatagcttatctattattgatgaaggtagaaatactttaccagaggtagaaaaattgctaagtatttcacaggatgctaccaatttaactaatgatgaattaaatagtttaaaaaacaaattaccagacgctaaaaataagattcatgaattggcagataaaatcaaggacatggatgaagaagataaaattgatgaattattggacatgatgacaagcaattgggaaaatcaaagtgattttgtagcgagtccagttgaaatagaagataatagattatttccatggcctaattacggcacagctacgactccattttataccgtactttgcttatgggttgggggattgttggcatcggctttattatcgcttgaagcacctaaatttgatgatggaacaaggattaaaccatatgaaatgtatttaggaaaactattattatttttgacagttggagtatgccaagcattagttgcaagtataggtagcttaattatgctaaaggtttatgcagttcatcctataatgtatattttttatagtatatttgtaagtattatatttgtaattgttatatatactgcagcaagtatactagatgatgtagggaaagccgcaattgttataatattagtacttcagatggcaggagcaagtggtaactttccgattgaagttgcaccagtattttttcaaaaattgtttccttttttgccttttacatatgcaattagtggtatgagacagattatggcgggaatagtgtattcaatattgattaaagacatagcagttttgtctatatacatgtttgtttcattaattgctggaatattattaaaaggatttatgaacagtattacaaataattttatggagaaattaaaaaagagtggaatattgagacattagtagttgttaaaataaaattattattaattggaataaatagtcaacacaactgattgctggctatttttttctgcaaaaaattaattgtatacatttatttataaaagtaaggtggcataatagaagaaaatgatataataaggttatagtttcataaaatagggggaaaaatggaaaagtataaaagactatcaaatgattttgttatgagtaaatctataatcatatatatttatatgataagtatatttttatattttatattaaaatttattgttaatgatgctagtgtacatatacctttaatttttagaatttattacataaccctaagtataattttatttgtattattaaagcaagtgagaagattttacaaaagatatgtttcgaagataataataatatttttctcattaatgatatttatatcatcgtttggatttataatgaaaatttatgatgcaaatagcttaatagaaattaaaaattatataaatttaagcagagagagtatattactaatagaaacttttgctagttatgtattaactgaatattatttggaaagaagaaaattaaagatagaaagttacggaatattaattttaattattacatgtacgttactgagttatttttctaatttgactatactctttgtgaaaattatatatacggttattgagataccagcatttataaaaatagttatgaatttaaaaaaatcaaactacttaagggaacatggatggagcatcataaaagtttacatatcctcaacggttctgatatttttaattaatatatatgcatttaacaatggccaatatataaaagatgcattaattgaagttatacattttgcaaactttacaatgctttggaattttattatatctaggttggttaaagatccatataaggccttatcacgttcgttgaatgataaaaatggggaactagatgaactaaatcatgaaatagaattaggaaatgctaagttagagagttcaataaatttattaagaagtaaagagtatttatattcaacattatttaggtttatgccccatccaattataattctgaatgcagataatgatagaatattatttgtgaataaacaatttttaaagatttcgggaatctcaaaaaaaagagaaataataaataaaaaaataagcaattatattgattttgtaaataataatgcagaaaataaagattatgatgcaattctttatataggaaatcaaaagaaatttataaaggcagaatttttgccttattatgaaaatgtatcatggaaattgctattgattaaagatagaacttctaaagttcttgtggatgaaataaggaaagaagttgagaataaacaaattgaagaaagtattaggagagaatttctttcaaatataagtcatgatttgaaaacaccgataaatgtaatatattcggcaatgcaggtagaaaaaatatatgttgaaaaacaagactttgatatattaaagaaatataatgatatatctaagcaaaactgtatctctttaattaaattaaccaacaatttaatagataattcaaagataaattcccattatttaacgccaagattagagaatatgaacatagttgaggtcatagaggacaatgtaatgtcattagtagaatatgtgaagttaaataatatagatttaatttttgatactaatactgaagagtgttacttggatattgatcgtgaatttatgtatagaataatcctaaatttagtttctaatgctgtgaaatttactaaagatggtggacaaatatgcgtggtggtaaacgaatctgatgataaggtcaatatatctgtaaaagataatgggattggaatagatgaggaatttatatacgaagcatttaatagatattcaattggaggaaattgtaatcctgaccgaaaaagtgggacaggcataggactctttgtagtaaaacaattaattgaactacaaggcggaaaaatcgaaataaaaagaaataataatttagggacaactgtaagtattgaatttaggaaagggatatagagatgtataatggtttcttagcattggacaaaataaagataaaaattagaaacattcagaagtatgcatttttaacggtactaataattttatgctctattcttactgataatgttaatttttatttgctattgaataatataattgcaatatctatgattttggcgtttatttatgtgtatataataagggggaagtttgtcggtaaaggttttgtagcaagattcaaagtgatatatttaatacttattatgatactagctataaatgttactgagataataatgttatttaaggatatttctaaaagttacttcatacttctttatagcatgcatgctactttagagtactgcataataaaagtaggactcgtggttaaaaataatgatagaaagagtcttataatatgtatatcagaaatactaatcagtataatgcttgttattagctttaatggagggaatggaatacataatccttatgaactatcactttttatatggtgcattaccataagtgttttgttaagtataggtttgtgtatatctacagtacaagatactttatctaaaagaaagcaatttacaattgatgaatttagacaaataatattttatattttttctatattatttaattatttgggatttatatgcctttatatgaactatgtgaaagtttctgaatttatattaattgttaaatgtattactttatataaattttatgattacataataagtaaagtagtggatagttcattaaaagaacttaataataatataggcaatgcaactaaaacaaagaaagaacttaactctatattaaggaaaaggaattctatattaaatgaaataagtgtaatgatcaaaaagagtggagataggaataatgaactaattgattctatttatggtggtgtatttctattttacctagataggcttcgacacataaataagaggacattaaaaactttaaacataactaatgatgagatcttaggaatagaaataaatgattttataaagatgtattttgatataacgcttgaagatattaagagagcaggtaattatattccatgcataaaaatgaaacatactgatttcgaagttgaaatatttttggcttccatagatgaaataagcaagattctttacatacatgatataagtgaaattaaagaaaataaaaagatgagagaaattcttgaagaatacttgcaagaggatgaaataaaaaaagaatttttctctaatatttctcatgaactaaaaacgcctataaatcttatattttctgcattgcaggttaatcaaatttattttaatgaaaataatctagatggagtaaataagaatagaaagattataaagcaaaattgtttaaggcttataaggactattaataattttatagatgctaataaaatttcagaggggtatctaattccgaatctaaaaatacataatatagttaacatagtagaagaggtttcgatggcgtctaataagtacataaaattaataaataatactctgacatttgatgcacaggaagaggaaatctatgttaagtgtgataaggagatgataactagaattatgttaaatattctttccaattctgttaaatatggaaagcaaggtggaaaaataaatgtgagtgtagagcttgataaggataacaaagtttctataaaagttaaaaatgatggcttgaaaattgataaagaaaccattccatatatttttgataaattcactaaactgaataaaacttttaatagactaaaagaaggaagcggtttagggttatttctaactaaagccttagttgaacttcaagaaggaaatatacggctcacatcaaataatagaggaaatgaattcacaataattatgcctatggctcagcaattacatgaagataaattcaataatgaagattgggaaacaaatttattagaagaaaagatagatatagagttttcggatatatatattgagtagaattagcttaataggaaatgaaaaaagtaagtggatatgaatttaataaatttataggtactaaaaataattacaatttgatataaataaacttgtaataaatagtcttattaattaatcatagttttacataaataaacatatattaaattagttatgttaaactaattacttaaatttgaggtgtataatttatgtcagaaaagtcagggaataaaaaaaagataagaattattccattgtttgtatcaataattattccacttttgatagggtggctttcaacattattagttcctaatatgagatcaatatatgaaagcttaattaagccacctttttcaccgcctgcaatagtttttccgattgtgtggaccatactttatataattatgggaatatgctcatataaagtatatattttaaaatatgagaataaagatgtaagctctgcaatatttgtttacgccatacaactattattaaattttttatggactataattttctttgggtttaagctttatgcgttagcatttttagaacttattattttgattatctttgtaattttaactataaagaggttttatgaaaagattggaaataaggcatttctattaattccttatctggcttggttagtatatgcaggagtattgaatttttttatttggatgttaaatgaaatgtaagttgtttatattccatgtaattaatatttttaagatggttgctaagattaatatctaggtgatcattttttatttaatgctatatttttctcatatgagttggaaaagacagaggtataaaaaaacttcgaacttcacggttgcctatgattttattctgatttttaatattatttatgttttagtttataaaaaaatatatctattttgccatttaaagaatattaatattatatactatcaatttagggaggggtctgctttgaaatattttaattaagtatataatagattcaaagtgggataagatatgaagaaagaattaactccaaatgaaattattttttgtacttcgtgtacagataacattaaaaaaagtaatattaatagagtacccgaatttacatctactttaaatagaattaaaaagagcttgagtgttgaaaaagaaggatacaatatatattacgtagattcattttcaaaagagaaactagagaatttaatagagtgtgttgaaaatatatatgaaaaacttcctgcaccaaaagatatttgctatgtaacctcacaagaacaactaaatcctactgcattgtttttaccaaatggtaaaggaaatatattaaaagaaatgattgatgatataaaagagaaatactttgaatgcatagtagagttttataacagttcttcagatgaggaaaaggaagatattattgaagaaataagtgaaaaaaggaataattatataacaaaacttatggattcagcaaaaaataagaattttgatgttaaagcaactagcggaggatttgtgtttattcctttgaaagatgaaggcaatgagatgactcaaaatgaatatgacagtctcgaaagtaacactcaagaaagcatcgaaaaacaagcatcaaaattaaaaaaagaagcagaggaaattctagagacattaaaagatattgaaataaaatccattaagaaacttaaaagtatatacaaagattttataaaaaagaatatgcagagtcataaggatgatttattgttacaatttatttcccaggatgatgtttataaatatcttcttcaaatgtatgatgatatagaagaaagagtagttgagtgttatactattaatttggaagatgatgaagattgtctaaaagatatattctctaattataatgtaaatgtaattgttgataattccgccatagatcatccgagagttatctatgatgaagatcctactattggaaacttaattggtaccattgaatatagaaacaataacggtggatatagtacagatatatctttgatttctgctggtagtttgttaaaggctaatgaaggatgtcttatattaagattaagttcgttaataagtagtggtgtaagctactactatctaaagaaatcattaattcatggcaaaataaactataattatacgaagagctatttagaaatgatatctctcgcaggattaaagccagagtcaattcctattaatttgaaggttattttaataggagactatgagagttttcagatattatatgataatgatgaagattttaaacaaatattcccaattaggatagaagcggataccgaattaaaatataatgatattactaaaaattctattgaaggattaataaaagaaaagataaaaaaagataacttattgaatataacagatgatgctcttaaggaaatgattaaattccttgctagggtcgcaggtcaaagaaataaaatatctatagatgattattatataaataaattactgcatctatccaataataatgcaaaagaagataaaagaaaaaatatagaaaagcaagatataattgatgtagcatatgaagatgaaaagattttggaagatataatggataattataaaagtaaaaaaatattgataacagtaaacggaagaaaaacaggaataatcaatgggctttctgtagttggaaatggatcctatagttttggtaagcctatgaggataacatgcttgtcaaatataggagatggaaggataatagatgttcataaagaatgcaaaatgagtggaaatatccatgaaaaatcgattggaatattgcgaggactattaagtaatttaataagtccttatgaaaaattgccagtagattttcaattaagttttgaacagacttatggaatgcttgaaggagatagtgcttctgtggcagagataatatgtattctatcagctttaagtaagaggccaataagacaaaatattgctgtcactggatctataaatcagtttggagaaattcaggcaattggtggggtcaatgaaaaaattgaaggattccatagagtttgcagcattattgataaaacagatgggaaaggtgtcttaattccaagtacaaatgccgatgaattaatattaagatatgaagttgaagatgatgttagaaatggaaagtttcatatatataccatggaaactttagaggatgctattgaagtattaatacttgatgaaggagaatcagtaaaaagtttctttaaggaaatagaaaatgaaattttaaaatataagggtggaaaaaagaaaaagtaattattggcttatctaataagtcaaatctttaagttagatatcacaactaagatatgaacttatttctagttgagatatatttcatagtataaatctaacttatagtttggttatctatatagatatccaaacttagaaatacacttatgcatagcatagctatttttacacaaactagtactagttaatttttgtaaggagaaatagctatgggtagaaaaggtattgaagtaacatcgttatataattggacggttgaaaatcttaagaaaatgagaaattcatctaaagacgaatttgctcgtaacgtgttaacagctgtaatcatgagatatgaagggaatagtactattgaaatatcaaagtttttattaaaaactaaatcaacagttattcattatataaaaagctggaattccgtcggtcttaaggcacttaaagatggccgtggtgctttgaccggaggaacttttacagctgaaatgaaggatgatttagtaaatactgttctaaatacgcatccaaatgattttggattcatcggtaatgtatggacttgccctcttttagcgacatatatatatcagaattatggaataaaatattcagttgaatatatacgagtgttactaaaaagaagtaatttgagctataaacgagcgcaactaaagctgataaggccgaacaagaagtctttaaaaaaaatgcgatgccttctctctactgtagaaaattcttctgattatgttctatattctttagacgaaaccggacttagaacagagtctgatattcgcagatcttggagtcaaattggcgtatcccctattttagaaagtaacaactctcacgagggaatcaatataataggtgcaacagaaatctccaagaactttgatactattatggatgcttatccagctaaacattcgattaaatcacacgaagttgaagtttttcttgaaagactgcttaaaatacatgtcggtaaaaaggtatatgttttactggataatgctaaatttcatacctctagaataatacaagacttcgctgacgcgcatagcgaagaattgtttttaataaatactcctagatattctccgattctaaacccacaagaaaatatctggaataagttgaaaaattgtatttttagtactagtgcttttatatctattgatgagctttttgaatcagtaaattcaatatatattcatttaaatgaagattttaacatggttaaatcattagtttatgctagaaattactattcataagtttaattcttaaattggatatctataagaaaataaaatagaagatgatcttatgatatatatttatatgagtatattgggattatcttctattttttatgtattaggcaaaaataatatattcatttaatatttgataattatgtagtgtagttaattatcggtatctttattttatacatcgttaatatatgtgatataggcggataattaagataatgagttataataaatagaaaaaaatgtaataaatagtttgacgttgaataaaatagtatgttaaaatatggtaaaaggtgaaatgagggaaaagaggaggtgaacgtagaatatcttaaaacttaaatatataagtttaaaactacattgtgagatattcttaattaatatgtatttaaaatttgagaaacaaaaaaatattctaataactactcttagtggtgaactagatcataatagtgcagaggaagttagagtaaaaattgatgataggatagatagagataatatagaaaaagttattttaaatttttcaggagttacttttatggatagttcaggaattggagctgtcttgggtagatataaaaaactatcgaacaaaggggggatgctttgtattgcagaacctaataagaatgttaatagaatttttgaactggccggattgtacaagttaattaaaaattataatactgtagatgaagcagtaaggtgcatttagatggaggggttatcatgtctgacaataaaatgagcatagaatttgtaagcaaatctgaaaatgaagcttttgcaagagttgcagttgcagcttttgttgctcaattagatccaacaattgatgaaataaatgatgtaaaaacagcagtgtctgaggcagttactaattctataatacatggatatgaaaatagagaagatggattagttagaattgaagcagaaattaatgaagatcaagtaactatagcgattattgataaaggaattggaattgataacatagagcaagctatggagccattatatacatcaagacctgatttggaaagatctggtatgggattcactgtaatggagacatttatggatgcgttagaggttgacagtgaaaaaggtaatggtacaaaggtggtaattaagaagaaatttaacgtggtaagttaggtgaaataagatggaaaaagaggatttaaaacgagaggattataattatgataagaatccaaagctattagctctagcaagaagtggcgatactgatgctatgaatacattaatagaaatgaatttgccattggtgtcatctataagtaagaaatttctaaataggggatatgattatgaagatatatttcaaataggatctattgggttagttaaagctattaataatttcgacttaaattataatgttaagttctctacttatgcagtccctatgattataggagaaataaagagatttttaagagatgatgggatgataaaggtaagtcgtaatgttaaaagccttgctagaaagatacattttcagaaagagattttaacaaaaaagcttaagagatcacctactatagaagagcttgcagattatgcaaatgttgataaggaggagatcttatttgcaattgaatcttctaatagcttacaatacttatatgatacaatacatcaggatgacggagctccagttcttttaatagataaactaagtgagaaaagtgcagatgatgaaaatcttattgaaaagatagctcttaaagaagcattaaatagtttagataataaagctaagcagattataatgttacgttattttaaagataaaacacaagttcaagtagctaaaatgttaggtataagccaagtgcaggtatcgagaattgaaaagaaggttttagctgaaatgcggaaaaaattagaagaataaaatttgctaattacacattggtaagaaaaatgataaacataaaaaagagttattatagaatatgtatttgtataattttttattaaattagatcaaatatatattctatttttttataaaatatatgccaaaaaataacacgattaatcttaataattttgcaaatgatagatatacaggtaaaaaaggagagtgatcatcttgactaataataaagaagtaagtgaagaaagcataaagcaaaaatataatgatatggccaatgaagccattccaaaatcaaagatacttaaagattgcttaaaagcgtttttagttggaggattgatatgcgatgtaggtcagttgatttacaatattgcagcaggatttggaattgcagaagaacaaataatgaatatggttcctattataatggtatttttaggagctttgttaacaggtactggagtatatgcaaaattagctaattttggtggagctggtactgttgttccgataactgggttttctaatgctgtagtttctccagcaatagagtttaaaaaagaaggatttatatttggagtcgcagccaaaatgtttacaattgcaggaccagtattggtatatggtattggtacatcagtaataataggaataatttattatataatttcaataatttaaatgaaaaaaggaattgaaattttaagatggggatatgtatttttttgataaataataaagttgtttttaattcaaaaatgtagaggagtgattaatttgcaaatgaagaataaaaagataggaaatcaaactgtaaaattagataatccacctaaaataatatcaacgcattctatagtaggccccaaagaaggggaaggaccgctaagtaaatattttgatgagatattaaacgatgacatgttaggaaaggaaagttttgaaaaagccgaaagcgagatgatgtttacagctatatcgcaagctttaaaaaaagggaaccttaaagaaacagatatagattatttattttcaggagacctattaaaccaaattatttcatcaagctttgcagctagagaattcagtattccattctttggattatacggtgcttgttctactatgtcagaatctttgagtttagcgtcaataattatggatggaggatttgctaaatacgtggttgcagctacatcttcacattttagttcagccgaaaggcagttcagatttccgcttgaatatggatctcagagaccagccacagctcagtggacagtgactggatcaggagcattaattttaggacatgaggggaattatccggaaataacatatgtgacaacaggaaaagttaaagattatgggcaaaaagatgctaataatatgggagcagctatggcgccagcagcggcagatacaattgtaaatcattttaaggatacaggaagaaaaccggaagattatgatgttatagctacaggagatttaggcgtaataggaagagaacttgctgataaattaattgaagactttggatataatattagaaatcaacatatagattgcggcgaaattatatttgataatgaaaagcagaatacattgtcaggtggaagtggttgtggatgttcagcagttgtttttacaggttatttatataaaagacttatgaaaaaggaaattaaaagagtattattagtttctacaggtgcacttatgagcactacgtcttctcttcaaggtgagacaattccaggaatagcacatgcagtcgctattgaaatgaattcaaattaagtaagaggaaacttataaataaacgagatgttagattataaaaatcttttgtttgaaaggaatgaaaagtgaatgaattatataagtgcattcatagttgggggcattatttgcgttataggtcaaatattaatagacgtcacaaaattaactccaggaagaatcttagtagtgtttgttgtgcttggagctatagtaggtgcttttggatggtatgataaattagtttctattggcggagcgggagctacagttccgttaccgagctttggaaatgcattagctaaagctgcaataaaagaggtagatgaaataggattattaggagcttttacaggtggaattaaaggagctgcagcaggaattacagcatcaatattctttggatatcttatggcactaatctttaatccaaaaaccaaaaaataaataaatttaatatggaaaaataattgagcccaatgaagattattatagtagaaatgctcagataaaattaacttttataaatatgtatcgaaaatatatataagatattaaagttttgccttttaatgtctttaaacgtataattatactataaatgaatgtatatatataaaaatgaaaaatatagtataataaagaagttattaatgaagtaattagaatggtggggtttttttggaaaaatactgcaataactcttgggctcaaatagttgaattactaaatagtaatgttcaaagtggacttagtgaaaatgattgtgaagcattaagattaaaatatgggaccaataagattgatttaccaagtggaaataaaatttataaacatatactaaatgctttaaagcaaaaatctataattataaatttgataattacaataattttattcgtatttgaacattatttatttggtataataacagccttgatattattattaaatttaattttaatagtaatgcatactataaaaagagataaagaaattggagctttagaaaggctgaattctgcagatacagtagttattagagatggagcccagaaaattataaaatctgaagaattagtaatgggcgatatagtaaaaattaataaagactctgttattccatcagatataagaataataagtgctaatgaaattaaagttgacgaaaagagtataacaggagaagcattttataaggagaaatttgaaagtaagatagtaggaaatatattttctttaacagatatgaaaaatatattgtttaaagggtctataataaaatcaggtagcggactaggtatagtaatatccactggtaattctactcagttaggtagaatgcttaccatgcttacgtatgcaagtaatagaaaacataattttgggacaatgatatctaaaattttagaaagatatttattaatttatttcctaggaattataattataggatcatattttgtatatacaggacaagatgcaaacaaaaattacatatgcacagctttatttgcccttggttgttttccagttactataatcgcgaaattagtttttaaaaatataattaaaagctttaggaatgaaaatatagaaataataaatttttcagtatttaatttaattaaagatgttaatattttatttttagataaagttggtgcaataagcaaaaaagaaatgatagtcaaaaaactatttattaacgataatttgatatcgactgaagatccgtatgtaaaagagacaacctttgataggatagttgaaatatcattagtatgtaataacgctatttataatccaagtgatgatagtggaaaaggagagttagatgagcttgcttttctaagttatgctgctagaaaaaaaatctacaaagctgctatagatagtaggaattctaaaattttagatatacctatggattctgataaaagattctctacagttgtaagtaaatttaataacagatatagagctaatactagaggaaacgtagatgatgttttagaacaatgtacacatgtcatgatagaaggtatcgagaaagagattacggatgaatacaaagcaaaaataaaggaagttgatatgaatttatctatagaagggttaataacagaaggttttgcgtatagaaactttacttatgaaccatctaaatctgaaaatatagaaagcaacatggtctttgttggaataattggattggaaaatccacttgaagagaatctcgaaaatacaataaatcgaattaaggataaagcaatagtaccaatattatttacagaagaaagtaaattaagtgctataacaaatgcaaaaatggctaatataataaagaataataatcaggtagtagcaggaatagaactggattctttaaatcatcaagaattaaaggatttgctttgtagggtaagggttttttgcagagtaaatccagaaattaaatcaaagattgtttcattatttataaaagatggccataaagttgcaactactggtgaaacgttaggcgatcttccagcactcaacttatcaaacgtaggaataggtaagggaaaagcatctacaattgtaaaaaaggtatcagatgtatatattaaagaaaattacctagatgggttctttaaaataagagatttttccagagtatttgatggcaatatagatagaggattcaaagtatatttcattgctctattctcagaacttctaactttagtaggaagtattataatgggacaaactggaagtttggattttggaaatgtggtaacgataaatggagttttattcattccattatcattaataatattacttaaaaaagggcgagatattactagaaatgaaatgatagttagatcatttgttctaagcataattacaatggtttcaatttacaaacttggtgataaggaagcagcgatagtgacattaactatattatcaattggaattttattatttacattgtttaatagcaatatttctataagaaaattttctaatgaattgattatgcctgttatatcattgttagtaattattattgccgtaattagtatgattctaattaatggaatattaattagagatataataggaatagaaatagcagcatcgataatatttttattaatctttgaaattttagctagaaagtggcaaaactcattaatgaggtgagttgatgttttctaaaaaaataggagatgtaggaaatccactaatatacatatttttgacgcttgcaattagttgtattttctatggaatgaataaggaatttagggggcttacaatattcattgtagccttcttttttatatgcatattttattattgtggtttcagtttctttgttattatgattatcttttttgttgttggaattttaattaattgttcctattataaaattccaagcaaaataggcggcgaagtaaggataataaaaataagcaattatagtgttataggaagctatgaaggtaagagtattacgataagaactaatgataagaatttaagagtaggtgaaaaatataaaattataggaaaagttgatgacatacaagatagatataatgggatagttggggaagtagagcctaaagtattgtataagattaatggagacttgataacaaagctttatgagattaaaagaaatatatatttgcggttagaagaaaatttaggaacaagaaaggcagggctaatatcatcaattgcttttggttattgcgattatttagattttgaagacaaagatgacatgaaaaactttggaatcatacatagcataagcgtttcagggttacatgtagctatagtatatggttttataagaatttttgttgggagaaatttaggaattttggtaactatgatatatattgtatttacaggactcaattattctagtataaggtcttttttaatgcttgcatgtgtagaaggtggacgtattttaaaaagaaataataattcaatttctgctctgtgtttctctgcaacatttttggttctttatgaaccttatagtatttttaatatatcttttcacttatcttatttagctactttgggaatagcaatgtttaataagaagtttaacaatacattatataaattgaacattaaattaagagaagcattaagtttaacattaagcgctcagatatttacgttaccatatctaattttaatttttagggatttttcagcaaattttattattggaaacttaattttggctccatttgtagatcttatggttattacaggaaatgcattggtattgacatatacttatactcaattatttgatttttgcagttatataaacttgaaaataataaatatgtttgattgtattctaaattatatggagaacttttcattgccaatgttttatggaaatgaaaatgtagttttcttctatctatttttaatgtttagtgcttactttgtgaataaaggatataaaaagtttgtttatcttcctcttatagctatttttataattacaattcagatatatagtccaattccaagtataaggtattataaagaaggtgctattttattttcttataaaggtgatagaatactaatgtccaataaaaatcaaattgatttaaatagactttctaaatcagcacttgcaacaaaatattttagacagagaagtacgattattatgaatggaatttataaaataagtttcaaaggaaaagattacgttctagatactggtactaaaaaatatctattaaaagttacaagtgataaaactcaacatgaagagtatgatataataaattttaatgataggatcactaataacatatttataatagacggaatattagtataggtttatagatttatattagaattaaattagaagcacattttatacgaaaggaaaattaaagtgattaattacgaagtttatgagcaagagattgaaaaaggaaatataaaaaatggatatatattttgtgggttagatgaagaatttattaaagatggaataagtctgattataaaaaagaatatagctgaagaatttatggatcttaatttaataaggatagatggaatgaatacaagttttgatgctatcatgaatgcgtgtgaaacaatgccattcatgggagaaaaaaaagttgtggttgtttataggtctaattttttacaggacaaaactgattcgtcaggaactaaaatatacaatgatattaagagctatatatcaaatttacctccatatacagtattaataatgtattatttattgaatgataagagagatagaccaaataaaaataagaaattagctactattggtaaatcattaacaatagtatattgtgataaattaaaaagggacaaatatttaaagaaagtatcggaagtatttaaagagaagggaaaacaaattggaagaactgagttatcttatttctgtgagaaagtttataataattttgacattataaaaagagaagctgacaagcttatatcgtattgtggtgaaagagagataaaaaaagaggatattgatatacttatttcaaaatcaagtgaggatgatacttttgatttagttgaattaatagctaccaaaaaaattgataaagctatagatactatgaaggaaattttatataaatcagaccagcatatgctgataataagtgctattcaaaagcatttcttgagattatatgagataaagataaaacttagcaatggaaaaaaagtagatgattttatgtcagactataggttgccgcagtttgtttgtgaaaaattaataatgcagacaaataaattcacagaaaagcagttatcagagttaattaagctttgcgttaatacagaaacaaagttaaaatcaactggaatagataagaatatggaaatggaattccttttaataaatacacttacagttaaaaaataatatttattaagaatataaaaaaatcgcaggcgactgtggagccgaagatttttttcacgcatctgccttttagaacgcatgtgagaaaaatttggcaggcgaataagatttctttttattctttttaaaataccaaaactattcaatcaaccttttataagttatccacaggttttactagaatataaattcctaaagaataaaaaaataacccatctacttagatgggttttaagattatgccatagagtttaacttagcagctaatcttgatttctttctagcagccatatttttatgaacaactcccttagtagcagccatatctaatgacttaacaactgatgtaaataaagctttagcttcttcattattcttagcttctatagcagcttcaaatttctttatagtagtctttaaagcagacttaatcattctgttctttaaagtcttagtttcagtaactttaattctcttttttgctgattttatatttgccattcttaattcacccccttaaatttttatagggtctctgcagtttttggggaaatctgcgtacgagttcatattcaacaaaccttattatagcatcagaagttatgtaattcaagtattaaattcaaagaaaaaggaaaaataagactgagtaaatttataaagaggtgttggtatgataaatgtaagaacggatttagtacttgaagcgagagaaatttataaagaaagtcacaaggatgaagtagatatagatggaatagaagttatagaagaaagtgatgatgatattaaggtaactacagtaaaggtaaaaaatgatgaaggtgctaaaaaaattggaaagccaaagggaaattatataactataggaatgccagactttacagcatatgatggtgaaactatggatagagtttcacaagtagtatcagagattttgcaaagattaattaggattaatacagagaaaacagtattagttgtaggacttggaaactggcaagtgacaccagatgctttaggccctaaagtgacagaaaagattatggtaactaggcatttacaaacagttatgccagaagcaattgatgagtctgtaagacctgtttgctctatagcgcctggagtgcttggagttacaggaatcgaaactgtggaaataattaaaggcgttgtggaaaaaattaaaccagacctagtgatatgtatagatgctctagctgcaagaagagttgaaagagtcaacacaacaattcaaattggagatactggaatatcgccgggtgcaggagtaggcaataatagaaaacaaataaatgaaaaaaatttaggagttaaggttattgcggtaggaattccaacagttgtagatgcaacaacaattgctaatgatactatagactctgtaatagattcattaataaataattcatcaagtggaaatgaattttataaaatgttaaaatctcttgataaaaatgagaaggaaagactcattaaggaagtgatgtcatcaaaagcaagtatggatatgatagttacacctaaggacattgatttaatggttaattctttatcaagaataatagccaatgggataaacatggcagtccaacctaatatggatatggatgagattaataagtttatgggttgattattaataatttatttcttgaaatttagaataagaagaaaagatctcaaagtaatttgaattattttgggatctttttattttagattgattattaatatatattttaatctattctaatttttaaatagatagaatgatatttattagaataattatgtaaatccgttaatataaatataaaaaagggcaagggggggattaccgtgatatatatgagcagaagaggaaaaaaaggtgaaattaataaaaggataaaagcaaaacctaacattaatataggcttaataatcctcattttaattataggtgtatttttcataagattaggtaatgttttaaaaaataacaaagaaagaggagcatttgcctatgttcaattgttaaatttaggaatgccgataatagaatcccaagtttatgatgaaggaacctatgctgaaaataaactttcattaaagaatgtttgttttcaagtattaggattaaataatcttagctataaaggaataattcaaaatgaacttagtttctttggtgatggagaaagttctagcaatactgaaactaattttagttttaatccgtttcaaataagcgaagacagtatatcaaaagtacaagtaaacactgatagtaagaataccccaatatatgatcctagcttaaagaagacattggataaatctaagccagaagtattaatatatcatagtcatactacagaaaattataatgcatcagaaccagatagtttaaatgaagataccaatgtagtgggagtaggcgatgttcttgctaatgaattagaagagaattatgggatttcagttatacatgataaaaccaataattgtatttcttataatgatagttatacaagatctggagaagtggttgataaatatttaaaacaatatggagatttcaaaatggttatagatctgcatagagattccgtagaagataaagctgcgacaacaacagaagttgatggaatgagcgcatctaaaataatgtttgtaaatgctgaaaatagtacgagatatcctaaaaataaagagcttacagagaaagtatttaataaaacatctgaattattcccaggattgcctataaaaatattaacatatcatagagggaaaaatgcatttaatcaaagtaaaagcgatggatgtttactttttgaaataggatctcatactaatacaccagacgagtcaaaagttacggcagaatgtatggctagagtaattgcggaagttttgaataagaaataagtataaagttacatggaaaaggtttggaagttatattgagtgcataggaaaagttagataacatgcaagtttgatttttagcactaagtatttaaatagatatttcaagttgagatttaaatataatcttgatgataaaaattaaaggaaagattaggagtctaaagctagaatttagatccctagtcttttctttattttaatttattaatacataatattgagataattggtgagtagattgtttgactgagaaagttgagggtgaataatagtttgactatatggaaagaatctaaataaaaatcaaaaaataaattaaaaagggtgtttcgacattgaagaaaattattaaaagtaacattttaagaagaatatcaccaatgatttttatattatttattatttttattggaataattaaaatagatatgattaatactaaagcattatctcctcttggaaatactaatgaaaattataaacttgtaagcaatgaatttggagaagatttctcgaattttatcaaggataattcatttcttaaaatttataaagaatctgaaaaagatgttttagttaagataggaagtaatgattttaggataaataatcaatcttcttttattaaaaaaatagaggatataattgaaagaataaaaccataatattagttaaattatttagttgattttaaaatatatataaggcatattagacatagagcattgagggaaagttttgatagcctttctttatggatatatgttataatttagctgatttaattataacgggggtgaaaggactgtttttcgttaaggataacagttatgcgtatgaaaagtgaaagacaaaaacatatcagaaatttttcaattgtagcacatattgatcatggtaaatcaacccttgcggatagattacttgaaactacaggaaccttaactaaaagggaaatggaagagcaagttctagataatatggagatagaaaaagaaagaggaattacaataaagtctcaagcagcgaggcttgtatatagaagagacgatggtgaagaatacattcttaatttaattgacactccaggacatgtagattttaattatgaagtttcaagaagtttagcagcttgcgaaggagcgatattagttgttgatgcaacacaaggtattcaagcccaaactttagctaattgctatttagcattagataatgatttggaaattgcaccagtaataaataaagttgatctgccttctgcaagacccgatgaagttaagaaagaaattgaagatgtaataggaattccagcagaagaagctcctactatatctgctaaaacagggcttaatataggtgatgtattagagtgtgttgttaaaactataccttcacctgatggcgatgaagaagctcctttaaaagcattaatttttgattcttactacgatagttataagggtgttgtatgtatagttagagtgatggacggaagagtaaagattggaactaaaattaaattgatggctactaataaagtttatgacgttactgaagtgggagtgtttactccaggagtgcttccaatcagtgagttaagtgctggtgatgttggatatgtaacagcatccataaagaatgttagagacgcaagagttggggatactataactgaagccaatagaccaaccgaaacagcacttcctggttataaacctgctataccaatggtttattcaggaatatacccagttgacggagcaaagtatgatgaattaagagaagctcttgaaaagctacaaataaatgatgcggcattaagctttgagccagaaacatctattgctttaggttttggatttagatgtggattcttaggattattacatatggaaataattcaagaaagagttgaaagagaatttaatttagatataattactactgcaccatctgttatatataaagtaatcaaaactgatggggaaatattagaaataacaaatccaactaacctaccacctttgacagaagtggattatatggaggaaccagtagttaaagcatctataataaccccaaaagactatgttggagcagttatggagctgtgtcaagatagaagaggtatatacatagatatgcaatatatagaagaaaccagagctgttgtaaattatgatataccattgaacgaaattatatatgatttctttgatacattaaaatctagaactagaggatatgcgtctttagactatgaatttaaaggatatattagaactaaattagttaagttagatatattattaaatggggatgtagttgatgcattatcaatgatagttccagaggagagagcttaccataaaggaagaggaatagctgaaaagctaaaagaaattatcccaagacaattatttgaaattccaattcaagcagcagtaggatctaaaattatagcaagggaaaccgtaaaagctatgagaaaagatgtattagctaaatgttatggtggagatatctcaagaaagaagaaactacttgaaaagcaaaaagaaggaaagaagagaatgagacaggttggttctgttgaagttccacaagaagcattcatggcggtattaaaggtagattagttagtataagtaatataaaatagaatacattatacatgtaaattatatttatttaaaaagtaattctaaaaactagcgaatgtataaaataaaaatatattatttttgaggaattatttgtataatattaattaggattatacaaataattattttaatgccggtttgggaggggtttgaatgtttttaaatgagttaaagaaaaatgaaggaattgcatttatgcaattggttagaatccttgcaaattcagacaatgtttttgcgaaagaagaaaaaaatctttataatgactatctaaaagagctaagcataaatgaaagtgaaatatcagaatcagatctaaattccgtatgtgaaaatctaaaaggttcgtctaatagatgtaaaaatattatttattttgaattaataggccttgctcttattgatggagaatataatgaagaagaagttgaacttttagaaaagctaggtgaagcattgggtataacacgtagtaagagaatagcatttgctaattatttttacaattttgttgatgtgtatggtttctctgttgtagatgcagaaagtaaaattgccttattaaaagaacaggcagaaaaattattagtatagatagtttttgatatgaaaaaagtatgatgtatattatctaaaaataaataataaagaatgaatgataaaagcgagaatatctattgaaatttaaattaaaggtgtacacaccttataggtttaaatgaagggtaaatgctcctctagttattcattctttatttttgctttattttatcaaataaaatatttaataatgtttggaggaaaaattaatgagggatatatctttatatatacatattcctttttgtaaacagaaatgtttttattgtgattttccatcttattcaggaaaagaaggattaatgaacgaatatatagaagcgttaagtaatgaaatattacaaaaaggaaaagaatacagaataagtagcatatttattggaggaggaacgccatcctacttgaatgacttaagtctagaaaaactactaggtactttaaataaattgaatttaaaggatgatttggagttcacagtggagtgtaatccaggtacattaaatgaaaaaaatctaaatattatgaaggaacacaatgttaatagaattagcatgggattacaatcaacaaaaaactctttattaaaagatattggaagaatacatagctatgaagaatttgaagaaaattattttcttgctagaaagctaggatttaataatataaatgtagacttgatgtttggattgcctaatcaaactattgaagattgggaatgttctttgcgaaaagcagcagaacttgaactagatcacatatctgcatatagcttgattatagaagaaggaactcggttttataatttatatgaagaagataagttgaatttacctgaagaggataaagaacgaattatgtatttgacaactaaagacatattgaacgggtatggatatcatcaatatgaaatatctaattattcaaagaaaagcaaagagtgctttcataataaagtttattggaaatgtgatgaatacttagggatgggggtgtctgctagttcatttatagataaaaaaagaagtaaaaatatagacaatattaaggaatatattaaaagaataaataataaagaaagtgtaattgaagaaattcacctaaatgatattaaagatgatatggaagaatttttatttatggggcttaggatgattgaagggataaaagtagagaaatttaaagagcgatttaataaagatatatatgaagtgtatggagaaattattgaaaaaaatattaaaaaaggattattaattaataattcgggaaatctatatctaacttcgcatggcatagaaatatcaaactatgtaatgagtgatttcattttatcttaatggattctcttatgaaaagtttaaagaaagattaagcgcaattataaaaatatattacatataaaaatggagaaaataggagatataaagagctaagttaacaaaattgctttattattaacgttaggtagctataataaatataaatagaattgacaaaaaacatcataaataatatattaaaaacatagtcattagcactcgaggttaatgagtgctaacaaaaagaggtgaggttatgagtattgatgacagaaaaataagaatacttcaagctattatcaatgactatattcgaacaggagatcctgtaggatcaagaactattgctaaaaactataacttaggtattgggtccgcaacaataaggaatgagatggctgaccttgaagatatgggatacttagaacaacctcatgcttctgcaggaagaattccttctagtaagggatatagattatatgttgatcagcttatggataatcagatgctaacagttgaagaagatctaaggataaaacaatatataatcgattcggcaatgcttgaagtagataaaatagttaagcaaactagcgccttattgtcagaacttactaaattaacttgtgtaattgagacaccatcagtaaaaaggagctttataaagtcaattcagctgattaaagttgatgatcataatttagtatcagtttttttaacagatactggtgtcataaagaatcatataatgaagctaaataatagagttcctgaagttgaaactttaacacgaataaatgaagttataaataatagattggtgaatctttctatacaagaaattaatttagaagtaattaataacttaaaaaaggatctaggagcctatgaagaaatattcaatgctttattgcctattttatatgagactctaaactcggcggattctacagaagtattcatggagggaactaccaacatatttaattatcctgaatataacgatattgataaagctaaagaaatgctatcgcttttgaatgataaagaagctttgatggagctgtttaatcctcaagacaatataacagtcagtataggggatgaaaactacaagccacaagctagagattgtagtataatatctgctgaatattcctttaaggataggcctattgggaaaattggattaattggacctagaaggattaattactcaaaggtaataatgattatgtcagaagttataaaagagcttaataatatattgagcaatccaaaatagatgttagatttaaagagaagaggtgtgtgttagatacatggaagaaaatagagatgttaaaaatgaagaactagagaaagaagaaattgcagatgaagtagcagaaaaggataatgagactcaagaaagtaatgatgcggcagaaacaaatgaagctagcaaagaggcttcagaaaatatagaagctgctgaggaagatcaagaagatttagtaaaaaatcaagaagaggaaaataagaaattgagagaagaattagatgcgacaaaagatagacttttaagattaacagctgaatatgataactatagaaaaagaacagctaaagaaaaagaaggaatatatagcgatgcatatgtagatgtattaaaagagattgttcctattcttgacaatttagaaagagctgttgcagctgatggtagtattgaagacttgaaaaaaggaattgaaatgacaataaagggatgcaaagattcatttgcaaaacttggtgttgaagaaatagacgctactggagaatttgatcctaatcttcataatgcagtaatgcatatagaagatgaagaattaggtaaaaatgtagtagcagaagttttccaaaagggatataagaaagatgataagataataagacatactatggttaaagttgctaattagaaataggaacaagtttcttattaagatatataaatagaattcaaaaataataaactgaaaaattcaagtttaaataaactaataaagttttaggaggaaaatatcatgggaaagattataggaattgatttaggaactacaaattcatgtgtagcagttatggaaggtggagaaccaacagttatagcaaactcagaaggtgctagaactactccttcagtagtatcattccaagcaaatggagaaagattagttggtcaagtagctaaaagacaagcaattactaatccagataaaacagttatttcaataaagagacatatgggaactggatataaagttgatatagatggaaaacaatattcaccacaagaaatttctgctatggttttacaaaaaataaaagcagatgcggaaagctatttaggtgaaacagtaactcaagcagttattactgtaccagcttactttaatgatagccaaagacaagcaactaaggatgcaggtaagattgcaggccttgaagtattaagaataatcaacgaaccaacagcagcatcattagcttatggtttagataaaacagattcagctcacaaaatcctagtttatgacttaggtggtggtactttcgatgtatctattctagatcttggagatggagtgtttgaagtattatcaactaacggtgatacaaagcttggtggagacgattttgatgagaagataatgaaatatattgcagatgagtttaaagcttcaaatggaattgacttaatgcaagataaaatggcagttcaaagattaaaagaagcttctgaaaaagctaaaattgaattatcagcatctcaacaaacaaatataaatttaccatttatcactgctgatgcaacaggtccaaagcatatagatttaacattaagcagagctaagtttaatgaaattactcatgacctagttgaaagaagtattgaacctatgagaaaggcattagctgatgctaaactttcattaaatgatatagataaaataatcttagttggtggatcaacaagaattccagcagtagtagaagctgttaagaactttacaggaaaagaaccatctaagggagttaacccagatgaatgtgttgcagttggtgcagctattcaagcaggtgtattaactggtgaagttaaagacgtggtattacttgatgttactccattaacacttggaattgaaacagcaggtggtatagctactccattaatcgaaagaaatacaactattccaacaaagaagagtcaagtattctcaactgctgcagataaccaaacatcagttgaaattaatgtagttcaaggtgaaagacaaatggctatggataacaagtcacttggacaattcacattatcaggtatagctccagcaccaagaggaattcctcaaatcgaagttacatttgatatagatgctaacggtattgttaaagtatctgcattagataaaggaactggtaaagaagcaaatatcacaattactgcttcaactaacttaagtgatgatgaagtagataaagctgtaaaagaagcagaaaaatttgctgaagaagataagaagagaaaagaaaaagttgaagctgtaaataacgcagaccaaactatatatcaaatagaaaagactttaaatgaagttggagataaagctactgaggatgaaaaggcagcagtaagagctaaaattgaagatcttaagaaagttaaagatggagatgatgtagaagctactaaagctgcaatcgaagcagtaaatcaatcattctatccaatagctacaaagatgtatcaacaagctggtggagcagaaggagcagctgatccaaatgcagcagctggaggagctcaaagtgcaccacatgatgataatgtagtagatgctgatttcaaagtagatgaagataaataagatataaattaggtgtactaaactacagttatctaatataataggatagggaaggcaagctcgtcttcccttttctacagtaaataaaactaggtggtgaatttaaacgaatggcaaataaagactattatgaattgcttggtcttcaaaagggtgcaagtgatgatgaaataaaaagagcctttagaaaattagctgtaaaatatcatccggatagaaatcaaggaaatgctgaggcagaagaaaagtttaaagaaataaatgaagcttatcaagtactttcggatccagaaaagaaagctaaatatgatcagttcggatcagctgcttttgatggtagtggcggattcggaggaggaggctttggaggctttgacggatttgatatgggcggatttggagatatttttgaatcattctttggaggcggaggatcaaattctagaagaagaaatggtccagtaagaggaaatgatattgagtatacaataacattaactttcgaagaagctgtttttggagtagagaaagaaatttctgttactagaaatgaaaactgtgaacattgtcatggaagtggagccgaacctggaactaatgctaagacttgcccaacttgtagtggatcaggtcaagtaagagttcaaagacaaactcctcttggaagttttgtatcaacttctacatgtgatacttgtagaggtactggtaaaattattgaaaagccatgttcagagtgtagaggaaaaggcagtgttagaaaaacaagaaagataaaagttaacataccagcaggtgtagatacaggaaatgtaatgcctttaagaggacaaggagaacatgggttaagaggtggaagtcctggagatttgtatgtaagaattaatgttactccatcaaaggtgtttacaagaaaaggaaacgatgtttatatagatgctcatatttctatgcctaaagcagcattaggtacagaaataactgtagctacagttgatggaaatgttaaatatactgttccaccaggtacacaatcaggaactatgtttagattaaaaggcaaaggaatacaaagagttaactcaaacggaaaaggagatcaatacgtaaaagttattgttgatattcctaaaaccttaaataaggaacaaaaggaagctttatatgattttatgagagcatctggtgaagagtttgatgaagctaatgttcctaagaaaaaattatttggaaaaaataaatagaattatatctgagaaactatttgaataatgtctatcaattagcattatttcaatagtttcttttttaaataaaaattccccgacaaaacctatagttatagtcatattttaaattataggttataatatattaaaataattatatttaggaggagaaaaagtgaaggaattgaaggaaaaattattaattgaaatagaagagtttagagaattaggaaataaatttttatctggtgaagtatctattatggattttaaaaaagtttctgggggaatgggggtatactcagaacgtaataaaaaagaattcatgataagactaagaattccttcaggaattagtagctttgagaacatgaattggttatgtgatatagctgataaatataatttagataaatttcatttaactacaagagaagcagtgcagtatcataatttaacgatagatcaagtttgtggaataatgaaggatggtatagataatgatatatattctagaggaggcggcggaaactttccaagaaatgtagctatgtctccactatcaggtgtagataaagatgaagcgtttgatgtgacaccatatgcattaactgtaaataaacattttttaaacaaaataacatcatataaatttccaagaaagtttaaagtatctttttcaagcagcgactcagatcaggggcattgtaatgtagctgatttagggttcttagcaacaattaaagataatgaaaagtattttagagtttttatgggaggcggaattggaagaaatcctcaagttgcagtcgaatatgatgagcttataaaaccaagtgatgtattataccacgtagaagccatgactagtttatttataaaagaaggtaactatgaagatagaaataaagctcgtataagatatatattagagagaatgggcaaagagaaattcatagaaacatataaagaacatttaaaatatgtgttagataataatgcgttagatttatttgtagaatctaaggaaattactaaagaaggtaaagaaattgaattaaaacattcaagattatattcacaaaagcaaaaaggattatacagcgtatatttccatccaattggcggacaaatttctgttaagacattaagagaaattttagataaattaaaagtagtaaaagacttagaaataagacttactatgacagaaggtttatattttagaaacttaaatggtgatgaagctaaagaaattttagatttaacacaaaatattggaggagaaacagctcttcagcaaagtgtatcatgtattggagtgccaatatgtcaagttggaattttagagagtcaaaaaatgcttaacaatataattaattactttgcagaaaagggttataataaagatatacttccaagagttcatatatcaggatgtggaaattcatgtgcagttcatgaagtcgttggtatcgggcttacaggaaaacgtaaaaaagttgtcgatgttgttgaagatgtatttgaattacatattaacggatcatttgaaacaggaagtgcaaggctcggaaaagtttatggtgacttacttgccagtgaaataccagagtttttatatgaattatcattatatatagagaataaaaatatgaatttttatgagtttgtagaaaataacgaggaagaactattaaaaataatagagaaatataaaaaataagtcataagataaagtagttaaaatagtacattctcttaagtatgaggtgtgctatttttttatatttaataatgatagggtgttaagtattaaattggatgattttttagataaacaacttgaggggggagagaattcttaattagtattaagaaagtataaaaatactttgagataaaagattcagtacagatatttgagttatttgcaatacctgtatatttttgagataaaaattgcaatataaatttttataggtataattattatgaaggatacggccgattaatagaacaataagacggtatgagcgtcttgtttatatggtattgtgtcgataagttcaatttaatgatctaaaaaacttaattgcagtgaaatgctattttttaaaagcttataaaagatggagtgaactaacatgagaatgagaaaaaaaccgtgggcaagacctgagcttgaaggttgcgatttttttgttataaatccgaaagaatataaaggtaagtggaaagaatttttcggtaatgataaaccaatatatctagaacttggatgtgggaagggaacttttatggcagttcatgcctccgagaatccagatataaattatattgcaattgacataaaggatgaggtattaggattagcaaaaagaaatattgaaaaggcttatgaagaaaaaaataggaagactgataatgtaaaattaatggctcaagagatagggcttatcagtgaaatcttaagtgaagaagatgttgtaagtagaatatacataaatttttgcaatccgtggccaaaggaaaagcataaaaagagaagattaacacatatgaggcagcttgaacagtataaaacatttttaaagagtgaaggtgaaatttattttaaaactgacgatgatgaattatttgaggaatcgcttgaatattttaatgaagcagggtttagaattaaatatataacatatgatcttcacaatagtgatgttgaaggaaatgttcagactgagcatgaaaaaatgtttagtgaacaaggaataaaaataaaatttttgattgccatgaaagacaattagatttataatgaccagaatttaagaatttaagaatttaagaatttaagaatttaagaatttaagaatttacccgattcacatgtgtttgatgagtaagttcgaggaaccaaatacaagatgctcgaagagaaagttctgctaaccaaatacaagatttgaagcatcacttttggactctcacttaagaatttaaacatatgaaaagatacgcacctatgaaaaagtgcgaagcacaattaagatcaattcacatatgaaaaagtgtgaagcacaattaagaacaattcatatatgaaaaaagtgcaaagcacaattaagagcttttaagcacaatacggaacttactggtcacaattaagaagtttaatattttaaaatttaaatattaaactagatatcaataaaaatattttaaaatatataaatttaactagatatatatgtaagtagttaaatagaaatctatgtaaatagttaactatataaatagatatcaatgttaaatatataaatatgtaaatatttatagttattgtaagggttacaataactttaaaaaaataaaattatatagttagcaaagagcaattgtaggaaaaaaattctatggaatttaaaaatatttttaataaattttgaaaaaaatggattcctaaattgcaaactgttactgaaactgaattagaaaggttgataaacatggatggaatatggattgaagttagtgtaataacaaagagcgaggcgttagagcctatatcaggaatattttatggattaaattgccctaatgttgcaatagaagatccggaggatttactttcaagagatcaaggaccattaacttgggattttgcagatataaatatcttagaacataaaggaaatgcagctgtagttaaagcttatttttctcaagatgataaggttgaagagattgttgaatatgttaaggaaaaactttctgaaattaaagaatttggaatagatattggtgaaggtacagtagaagctaagaagatgcacgaagaggactgggctaataattggaagcaatattataaaccagttaaaataacagataagattgttgttaaaccaatttgggaagaatatgaaaaaaatgatgaagaactaattatagagttggatccaggaatggcatttggaactggaactcatgaaactacaaggatgtgtattcaagctttagataagtatgtaaagcctgatacaacagtatttgacgtaggatgtggatcaggaatacttgcgatagcagcagcgaagcttggagctaaacatgttgttggggttgacctagatcctgttgctgttgattcttctaaagaaaatataagctttaataatttgaataatattgaagtattagaaggaaatcttttagatgtagttgatggaaaagccgatatagtagttgcaaatataatagcagaaattatttgtgtactaactgaggatgttaaaaaggctctaaatgaaggtggattatttataacttcaggtataattcatgatagggtagatatggttacagaaaagtttgctgaatgtggttttgaagttattgaaatcaataaagatggagaatggaactgtatagttgctaaagcaattaattagtataaatatagatatttgtaatgcaaattttggttaacggtttgaaaatgtaattatgaaaataatgcacaatgtacaattcacaatgcacagtttgggagaaatttctaagagattttttagaaaatctatagttgatataccgtaatcaattattatttaattgtgcattgagcattgtgaactgtgaattagagaggagtcgtatgcataagttttttacagaacctcataatattagtgaaactgaaggtaaaatacttggagatgatgtaaaacatatttataaggttttaagattatctgaaggtgaagaagtagtattaaacaattgcgaaggaattgagtatctaggtgagatagaaactataactaaaagtgaagttatagttaaaattattaaaagattagatataaataatgaaagtaaagttaaagtacatctgtttcagggactaccaaaaggtcagaaaatggacctgatagtacaaaagggaacagaacttggagtatctgagtttattcctgtaacaactgcaagagtagatgtaaaacttaaaggcgaatttaaaaagcttgatagactaaatagaattgctcttgaggcatgcaaacaatcaaaaagaagtgtaattcctcaagttaaagaagttatagatttcaatgaggcaataaatgaattaaaaaagatggatttgattattgtaccttatgaaaatgcagaagattttgggattaaaactcttgtgagaaaattagaaagagatagtgtggatttagatactataaataatgttggaatattgatagggcctgagggcggatttgaggaatctgaaattgatgatttaaaagaacagggtgcttatatagtgactcttggaaatagaatattacgtacagagacggctggatttacagctacggcattaattcaatatgaattaggagatttaggaggaaagctatcataatgggagagaaccaaatgaaattagtcagagcaggtagtgacaagactaagcttaagaagttatctaacaaagaaccaataaaaaatacagaggggaagagtcttgtggcttttgcaactcttggatgcagggtaaatcattatgaaacagaggctatggcggaaaagttcataagagaaggttatgaagtaactgactttgaaggttttgctgatgtttatgttataaatacttgttctgtaactaatatgagtgataaaaaatcaaggcaaataattagcagagctagaagaagaaatgaaaatgcaataattgcagctgttggatgctattcgcaagttgcgccagaagaagtttctaaaatacaaggggtagatgttgtacttgggactagaaataaaggcgatattgtttattatgtgaataaggctaaggatgagcaaaaacctcagttaatggttggagaagttctaaagaataaacagtttgaagaattaaatatagaagagtatcaagataaaacaagagcatttttaaagatacaagatggttgtaatagattttgtgcatattgtctcataccttataccagaggaacaacttgctcaaaagaccctcaaaaagtattggatgaaataaagaatttaagtgaacatggatttaaagaaataatattatcaggaatacatacagcatcttatggtgttgatttagatggaaatgtaactttaataactttattagaagaaatagagaaactggatggaattgaaagagttaggataggttctatagagcctagtttctttacagatgaagttatcgagaaaatgaaaaaaatgaaaaaactatgtccacaatttcatttatcacttcaaagcggctgtgatgcaactttaaaaagaatgaatagaagatatactgctaaagaatacgaagatgcagttaatagaataagagaaaaccttaaagatgcatcaataactactgatgtaatcgtaggtttcccaggtgaaactgatgaggaatttaacgaaacttatgaatacttaaagagaattaaattaactaaaacacatatattcaaattcagcccaagaaaaggtacgaaggcttcagatatgcctaatcaaatagatggaaatgtaaaggacaagagaagtaaggctttaattgaactaaatgcaaagaatgaaggcgattttagtaaatctttagttggaagagaactagatgtattagttgagcaagaagtatctaataagcctggggtatttgaggggtatacaagaaattatgtaaaagttgaaattccaaatggaagcagagatatgataggaaaaataattttatgtaaaataatggcctcagatgcggaatatgttgttggaaaaattatatagttttggtataatataaatcaagataagattgattaaggatcatttttggaataagatatataattcaaagagaatttctaaatatgaattataaaatctcgattcttacgtttgtgaattgagattgctacttagaaggaggtgaatttatggaaggttgtatattttgcaaaattataagtggggatatccctagtaaaaaaatatatgaagatgataaagtttatgctttttatgacataaatcctgaagctccaactcatttcttagttattccaaaagaacatatcgaaagtgctaatactttagatgacagcaatattgatattgtatcacatatatttaaagttattggtaaattagtagtagatcttggaatatcagataaaggatatagggttgtaaataattgtggtgaggatgcaggacagacagtaaaacatattcatttccatgtacttggagggcgaagtttacagtggccaccaggctaaatttgagttgttatttgatcaatagtaactggagattttttcttaatttcttgacattattaatttaaatattgtataatatagcatgtgttattaagcccatagctgagttaatttaagctagcggagggagggatagtaaatgtcagaaattaaagttggagaaaacgaaacacttgaaagtgcgttaagaagatttaagagaaaatgtgctagagctggggttctttctgaagttaggaagagagaacattatgaaaagccaagcgttaagaaaaagaagaaatcagaagctgctagaaagagaaagttcaaataatgatattttcttttgaaagaaggtacaaaaatgtcatcaattaaagatagattgcaagatgattggaaaattgctttaaaagcaaaagataagttcacatctagtgtaattagtacagctaaagctgcagtattattggttgaaaaaactgataatagaaagcttgaagatgatgaagttattacaatattagctaaagaaatcaagcaaagaagagaagctatgcttgaatttgaaaaggggaataggcaagatttaatagatcagtctaaggctgagattgaaattttgttgaaataccttcctcagcagttaagtgaagaagagataaaacaattagtaaaagaatcagctgaagaagtgggtgcaaatagcattaaagatatgggaaaagttatgtcagctgttaaacctaaagtagtaggaaaagctgatggtaaacttgtaagtcagcttgttaaggaatatttaaataataaataagaataaaattcaagattgttttgagttttatactaatataacaggacataggattataaatagtatcctatgtcctgtttcattgttatctaaaattggactagcaatgaaaggataatatttggttcatataactagaatacattatcgtaaatgaattagataaagccataatagtaatgattggctttatttttttgcagaaaattatcattattattaaattatagaattaattcgcaaatcctatcataaattacaatgagaaagtttatgtgggaggaaagtatggaagaaaaatttcaaagaggtaaagaaaagatacttagcaagttagattttccaagtgacatttcattagatctaccaaagataatagtcgtgggaaacagagaaataactattgaaaatcataagggcattatatttttcgaaactaatatggttaaaataaattccagaataggtgcaatcataattgaggggaaagagttcgaaatactttttattgcagaaacgagtataacaataagcggaatctttaaaggtatttcatatgagaggtagaatattatgtttagcagcttgaaatcgggacaagtaaccatagaaattaatgctttagtgccagaaaaaatattaaatgccttttggaatagccaaatctatacctgtaatatagtgaaagtaagcttgacaacggtaagagtaactatatattacagagattataaagatgcagaaatattaataaaaaaatataaaggaaaagttaagatagtaagaactagtggaataatagttttacttatgaaaatgagaagaaagatttctctagttataggaatgggattattttttgctgtgatatatatattatcaaattatatatgggctatagatatagagacacagaggaatttaagtccatttgaagttagacaacagctttcatcaattggaatcaaaccagggcttaacaaatcacaagttaatgtatatcaaatagaaaaaaagatggaagatttaaatagccagataatgtggattagggttaggatagaggggtctacattaaaattggttataaaggaaaaagtaaatcctccgtctacagaaaaaacattatataatcaagttgttgctaaaatggatggagaagtaaagagagtatatacgaattcaggaaatccagcagttgtgccaggagatatagtaaagaaaggtgacgatctaatattgcctatccaaggaagggaaggctttcagatggaagtaaaaccgagtggaacagttatagcaaatactttttatgataaatttatggaggttcaaataagtggagaaaagcttgagagaactggtaacaagaatagtgatatatacttaaacttttttgggaaaaaagtttacttgaaaaaagctataaatcaatttgaatattatgataaaatagaagagaaggatggtttctttaataagataacatatttcgaaaaaaaaggtataaatgtaaacttagataaagaaagtacagttaaagaagctacagaaaagttagaggggtcattgagaaaaacacttagcaacgatgcaaagataatagataagaaaactgcagtagaagatattgaaggcggaaagatcttaattaatgttaaatttactgtagaacaggatattgctaaaaacgtatcataaggggtattcaaagttgtttttatgcctattacttattattaagatgaaaaggtgaattacatggatataaaacaaaataataaatggaaaaataatagaattcaaagaattgtattatttatacttgtatttagtataggctatttattgcttgttaccgcaataactcctaagcaatatagcttaaaagaaggagatataccaagagtagatataaaagctccaagagatatagtggatgaaaaagctacaaaggaaaaagaagatcaagcggccgaaaaggtagggaaacagtatacatcaaagccagaagttaagaaagaagctgaggataatgtaagggcattgttcgataaacttgtatcattaagcaatatggcgagctctaccgtagctgataagcaaactgagcttaagaaattaactatatttcaattaacagatgaacaatgtaaggcgttgataggaatatcaaaagatactttgccgggcatagaagacaaaatagtaaatataattgacagtgcatatgaaaaaaatatacaggaaaaagatgaaggtgccttaaaagaagcaaaaggagctgtttcaactcaaatagataatttaaacttggataaagatgtatcaagtgctttaaagcaaatagctcaaacacaaataaaccccaatgttttttttgatgaagaaaaaacacaagaaaagatacaggaagttaagaagaatgtatctaaagtaataataaaacaaaatcagattatagttaaagaaggagagcctgtaacacaagatcaaattgatattctatcagatcttggaatgcttaacgatgaaaatgtaacagcttatgtatatatttatttagcgcttgcaatattttggatgataatattgtttcttcaatatggatatgtgagaataaattatggtgaaatatataagaacaataaaaagcttattcttataagtacaattaatttgatttcacttgtgttagctagaactgtaggggttatatcgccttttctaattccgtttgcgtgcgcgcctatgatgcttacgctattactaaattataagatatcatttgtacttagcgctttaaatgcaatagttataggagcattaaatggttttgatgttcagattattattctaggaatagtaagttcggtattaggagcggcatttttgaaaaagatgcaacaaagaaatgaattgctatattcaacattgtatactgctgttgttaccgtaatacttacattgtctactggaatattaatatcgagcaatttcggagatgtgttagtaaaaggtggaatcacattcattggaggccttttatcaggtatatttgcattaggaatattaccgtttttagaaggtacatttaatgaggttactacattaaagctgctagaattatcaaatcctaatacaccactgttaaaaaaattattaatggaagctccaggaacatatcaccatagtatgcttgttgcaaatctctcagaaatggcagcagaagaagttggtgctaattcggtaattacaaggataggatcatattatcatgatattggaaaaacagagaggccatatttctttggagagaatcaaatgggtatagataatccacatgagaatatacctccaaatttaagtgctatgataataaaatctcatgttaaagatggtctggagttagctaaaaaatataagcttcctaaggttatccaagatattatattagagcatcatggtaaaacattagtaaagtatttttactatactatgaaaaatagtgctgaaaatccagaggaaataaaagaagaagattatagatatgaaggcccaataccaagctcaaaagaagctgggatagtaatgctatctgatagtgttgaagcggctgtaagatcaattaagaaacctactaaggatgcaattaaccaaatggttaattgcattatagatgataaattatcatcaggacaattaaatgattgtgatttaacattaaaagatatagaaaaaataagagtatgttttttgacttcgttaaatagcatataccatcaaagaatagaataccctaaagaaaaaatgaaggatttcaatggtgaaagcaataaaggttaatttaaaactaaggagtaatttaaataatgatttatgtagataatagacaaaataaagtggaagcaagtgaaaaattaatagaaagattaacagaagtaatagaatttgcattaaaagaagaggaagtaaatatgaaatgtgaaatttcattattgttcgttgataataatgaaataaaggaaattaataatgaaacaagaggaataaatagagaaacagatgtattatcttttcctatgttagaatacgaagataagaaagtatttaaggatatgtataaagattataagttttctcaatctgattttgatggtgacgaacttgtacttggggatatagttctttcattagaaaaagcattagaacagagtaaagaatttaatcattcatatgaaagggaagcctcatacttagttgtacattcagtattgcatctattgggatacgatcatatggaggatgatgataaaataattatgagaagtagagaagaagatattttaaataaacttaacataatcagagggtaatattttttattatgtaatagaagtaggggtaaataatgaaaatgaaaaaaacactggaaagcttcaataatgccataactgggattatcgatactgtaagaactgaacgaaatatgaaaatccatttaatagtggcgttagtagtactaattgcaagctttttctttgacataacaaaatatgagtttctgatattagctgttacaataactatggtaatagctgctgaacttataaatacagccatagaggcgactatagatatgacaactaattattaccaccctttggctaaaatcgctaagaatgcggcggcaggtgcggtattaataacagccataaacgcattattagttggttatattatattttgggataggctcagtagattttcattttctttaattaataaagtaaagaattcagagccatatacgatattgattgttctagtaatagtatgtatagtaactataatagcgaaagcaatatttggagaaggaactccgttaaaagggggaatgcccagtggccacagtgctttgggattttcaatagcaactgcaatatcattaataacggaggaaccaatttgcattctattgagttttttattggcgtttataactgcacaaagtagagtggattcagaagttcatagtattttagaggtaatagttggagctatatttggtatattattaactttgtttatttttacattatttaggctttaattaaatatagaataataaaaataatatttataggagaagatataagatgaaataaaacttatattgtctcctatttcttaaattataagaattaatgatttaattcataaggaaacaattggaagtaattattaaattattatatgatcaaattaagaatagtagattgtcaatttacttataaatagagtatactatttgtaaaataggataacgttagttaagcttttttaagcttattttgaggaggaaaaaatgtttaaatcaggatttgttacaatagttggaagacctaatgtaggaaaatcgactttattaaattatataatgggggaaaagttatcaatagtttctaataaacctcagacaacaagaaataacatacaaacaatattgacaggtgatgattatcaaatgatatttgttgatacaccaggtatacataaacctaaacataagttaggagaatacatggtaaattcggcaaaagaatctactaaagatgttgatttagtattattcttaacaaatccagatgaggagattggaaagggcgataaatttatattagaaaccttaagggataaaaagtgtcctgtatttttagttttaaataaggttgatgaaagtacacaagatagagtggcaaaaagtttagaaatgtattcaaaagaatttaaatttgcagagatagtacctatttctgcaataaaagggaaaaacgttgatgtattagtagaacttatgaagaaagcaatgccagaaggacctaaatattatccagacgacatgataacagatgttcaagaaaagtttgtagtatcagaaataattagagaaaaagctttaagaaccttgagagatgaagtgcctcatggtatagcagtagatataattcaaatgaaacaaaatgaaataggtacatatcatatagaagtagatttaatttgtgaaaaagattcccataaaggaataataattggaaagaatggtcaaacacttaaaagaataggcgaaaattcaagatatgaattagaaagatttttaagatccaaggttaatctaaaaatatgggtgaaagttagaaaagaatggagagataatcagcttttattaaaagaattaggatataaagcgaattcaaagaaatagagtatcaattagaaatagataattagcctaacatattattttttttatatattccaagtgggagatggttgacctgtcaatagttgaaacaaaagctgtaattataaaaacgcaagattttaaagagaatgacaaactagtttggttttatactgagaagttaggtaaaattacagctatagttagaggcgctaaaaaaagtaaaagtaagttcttagcattgacattgccattatgttatggagaatatatggtatataaaggtaagagcttgtacactcttcaagaaggaaaaataattcaatcttttcaaggacttttaaatgatttacataaacttacatattcctcatacttatgcgaattaatagatattgcttgtactgataatgaaattaatatggaactttttaagacattgattacaacattatacctactgaatacagatgccctagattacgaactactaataagagcatttgaattaagattattaaaaacaactggatataatctaacattgaataattgtagcgtatgtagaaaaaagatatcttcatctaattatataagtttatcccactatggaggtatatgtgatgaatgtcccaaagaacatggagtatttatttcaaaaggtgcatataatgccttaaggtttttgatgaatatggatatagataaattatatagactaaatttaaataatgaaataaaaagtgagattgaaaaagtaattacttttttagtatctaatagctatgctaaaaagcctaaaagtttggagatgttaaaatttattaaggagtgatgatttatggaaaatataacattagaaaaagttgatatgatacgtgaaagaacaggagtaagctatgaaaaggcaaaggaagctttagaagtatgcgaaggagacgtattagaggctttaatatacattgaaaagtctcaaaagttatcagatattaatgatgaatttgttgatgaggaagtaaatagggctcctatatctatagaagaactaaaggctttgattaaacaaataatagaaaagggaaatgtaactaggataaaggtcaagaaagatgataaggagcttgtagatattccggtcaatgcaggaattgcagcaggagttgtagctattataattccaccaatacttgcagcaggagttatcgcggcaatagcgactcaaattacaatagagataactatggaagatggatctgtggaagttgtaaacacgtatgtttcagaaatggcaagcaatgttaaaaataaagctactgattttgctgataaaattaagactaaggttaatgaaatgaagaatgacataggtaaacatagtgatgattcaaaacaaaaagtatatactggttcagatactgtatatacttatacagttaattttgatgaagagaaagaaaattcagaaaattaagtgatattgagagtaatataaagaaaaatagatatatcagtgatataaaattaatatacaagaaatatttagcgaatttatttgatttttctgaaaattaagtctagtcaaacaataattacatgatataattagagagtagtaaaaattaatgaatttgaactaaatatttcttatatttacagaaagagggataagattgaaattatcacctaggcaagaagaaatagtatgcttagtaaaagaaaatgcacctataactagtgaagctcttgcagaaaaaattggagttactagagctgcgctcagggctgatttggcggtactgactatgataggaactttggatgctagaccgaaggtaggatatgtatatacaggaaagacttctaatggattgatttattcaaacattaacaaaattaaagtatccgaaataatgtcaaaacctgtgactgtcagtgaagatacgatggtatatgatgcaatcgtatacctatttctgaatgatgtagggacattatttatagaaaataatggggtgcttacaggtgcagtctctagaaaagactttctcaaaatttcaataggggggactgatatacatagagttcctgttggagtaattatgacaagaatgccaaatataatttgtgcgaataagaatgataacgcatatgatttggctaagaaaattattgaacatgagatcgatagtattccggttgttgaaataatagaaaagtctgatggaaaagatcagatgaagataatcggaaaggtttctaagactaacataacaaaattatttgttaaaattggagaaaatgagaattaattaacagggtagctacgaagtctttagataggcatcgatagtaaatatagtgagaaataataagaaaagagggagtattgagatgtcaaataagtatgtatatctttttagtgaaggaaatgcttcaatgaaaaatctacttggaggaaaaggcgctaacttagcagaaatgactagtctaggaattccagtgccagatggttttattgttacaacagaatcttgtaataaatattatgaagatggtagaaagatttctgatgaaataataggtcaaatctatgaaagtttatcaaagcttgaagaatctacaggtaagaaatttggagataatacaaatcctttactagtttcagtaagatctggtgcaagagtttcaatgccgggtatgatggatactatcttaaacttaggattaaatgatatagctgtagaagcaatggcagaattgaccaataatccaagatttgcatatgattcttacagaagattcattcaaatgttctctgatgttgttatgggaatagaaaagagattattcgaaaataagattgatgaacttaaggagaagaaaggtgttgaatttgatacagatttaacagcagatgatttaaaagaattagttagtgaattcaaagaaatctacaaaaaagaaaagggtgaggaattcccaagtgatcctaaagctcaattaattgaagcaattacagccgtatttagatcatgggataatccaagagctatagtatatagaagattaaatgatattccaggtgaatggggtacagctgtaaatgtgcaacaaatggtatttggtaataagggagaaacatcaggaacaggagttgcattctcaagaaaccctgcaaatggtgacaatgctatatatggtgaatatctaatgaatgcacaaggtgaagatgttgttgctggtattagaactccacttgaaattggaaaattaaaagaacaaaatccagaaatatatgcacaatttgaaggaattgttaacacactagaagatcactataaagatatgcaagacatggagtttactatagaagaaggtaaattatatttcttacaaactagaaatggtaagagaacagctcaagctgctttaaagattgctgttgatttagtagaagaaggaatgctaagcaaggaagaagcaattttaaaagttgaaccaaaacaattagatacattattacaccctgctttttatactgaagatttaaagaaagctacaccaattgcaaaaggattacctgcatctcctggagctgcatgtggtaagatagcatttgctgctgatgaagctaaagatagagcagcacttggagaagatgttgtacttgtaagacttgaaacttcaccagaagatatagagggaatgatagcagcacaaggtatccttacagtaagagggggaatgacttctcatgctgcggttgttgcaagaggaatgggaacttgttgtgtagctggatgtggaactataaaagttgatgaagtaaagagaactgtagaagttaacggaaaagtttatacatctgaagactacatttcaattgacggtacttcaggaaatgtatatggagaaaaaataaaaacagttacaccagaaatttcaggacattttgcgacattcatgggatgggctgatgaaataagaaaattgaaagttagagctaatgcagatagtccaagagatgcaaaacaagctgttgagtttggagcagaaggcataggtctttgcagaacagagcatatgttctttgcagaagatagaattatggctgtaagacaaatgattacatctaaagatttagaacaaagaaaagtagctttagataagattttgccaatgcaaaaatcagatttcataggaatttatgaagcattagaaggaaaagcagttacaataagattattagatccaccgctacatgaattcttgccaactgtggattcagatataaaagaattagcaagagaaatgggaataacttatgaggaattaaaatctactgtttcagaattacatgagtttaatcctatgatgggtcatagaggatgccgtcttgcagtttcttaccctgaaattgctgaaatgcaagcaagagctattatagaggcagcaatagaagttaaaacaactaaaggctacgatattgtacctgaaataatgattccattagttggagaaattaaagaattaaaatatgttaaagatgtaattgtatcaacagttaaagctgttatggaagaaaaaggagtaactttagattataaggttggaactatgattgaaattccaagagcagcattaacagctgatgaaatagcaaaagaagcagaattcttctcatttggtacaaatgacttaactcaaatgacatttggattctcaagagatgatgcagctaagttcttatctgcttattatgaaaagaagatttatgaacaagatccatttggtaaattagatcaaacaggagttggttctctaattaaaatagcagtagaaaaaggaaaatctactcgttcagatatccatttaggaatctgtggagagcatggtggagatccttcatcaattgaattctgccataatataggacttaactatgtatcttgttcaccatttagagttccactagcaagacttgcagcagcacaagcgcaagtaaaaaatccaagataactttaaaaaattaaagattatgataaagtagcatataaatcttagtaaaagaagatttaaagtgaaaaaatatagagcattgtaatttgaaatcacatgtgattttaattacaatgctcttttattatcgtacttttaagctgttattatgaaattatttagaatgcaggctgcctaatattttacaatatagacagcctgatgcagttagtttttataaaatcatgaagagaagattggctcaacctaataaaagatggtggtttacagaaacaatttcaaagtaaagtcatattgaattttttttgtacttgatttattatatctagcgcaaaatcatattgaagatttgtttttgatgtcgcgtttattattaaagttaagaaagcagatttattacacttgtgaatattcctatagtagtctcttgatatcctccaatatttttgcggaaagcaaatataagaaattaagtaacgtaaatctgagtgtgttaaaggacacaattcattataggcatctaatatagagagagctaactcaacattccattttgtgttttctcgtttaagtaatcttcgcataaaatatgctagatcttttgcactgtaatctactttgcacttatcaaaatctatcacccaaggatctagatcaggaggaaaaattaggtttttgtttacatagtcaccatggcataaagatttacttaattcattattgtcaattttatttgatatgtctagagagagtttagcaaggcgtaaatttatatcaaaacttgaaataaattgtcttgaaaatgaatctttgtatttaaacgattcatttgatgctttaagtaaatcttcaaaatgttttaaggtagatatgtaataatcctcaaatccttcttttgctgaacttcctaaaataggtctaaatttacgagatactgaatgaatctcagagagttttcttacagagattaaaacatgatccaaattatcgaaattacatttctcaccctcaatccaaggagttaatataaaaagcatatctcgataagatacaaatctattattatcaattgtaggtaaaagttttgagaccctaatattatttctatatagccactcaatagctgaatatacatatagcaagtcattcaaattataataaactttttttagacagtaatttttatctttataatttaccctataaactgctctttgcttatcagtatctttaaatttaattattgaaatctgagagttttgtaaattatagtatggtaaaacattttgttttataatttctggggaaagattagattcttgtaaagataaaacttcagtacccataaatacgctcctttataaggtgatttttattgaacttttatgatacaaggtaaactttgattgaaagttatacctttaagtaaaattaacatgtttttaaattttaattaagatatagaaatatatatataggtaagatttctatataaaaaaattcctaattattaaataatattaatttaatcttagtattagactaaaaataataaaaaataaaaattaatgaatataaagatattattttttagttatttgcaaataataaatatagttaataaatagaggaatataatgatatagatagaatacataaaaagaggtgataatatatgaatgtaagagaaaaaattcaaaattttgaaagcttgacattaattaaagaagctgctttttcaaaaaattctattggcagaaaaattagagaagaagatgatgatattagaacttgttatatgcttgatagagatagaattattcaaagcaaatcattcagacgcctcaagcataaaacacaagtatatataaaaacatttggagatcattataggactagattaactcatacattagaggtatctcaagttgcaagaaatattggagctggaatcggattaaatgaaaatttaattgaagctatagcgttagggcatgatcttgggcatgttgcttttgcacacaatggagaagaagtgctaaatgaatatttagaagatggattccgtcacaatgaacaaagcgttagagttgttactaaactcgaaaataacgggcaggggcttaatctaactgaagaagtaattaatggaatattaaatcatagtgggcttggaagcgttaaagatataattacattagaaggaatagtggtgaaatttagcgataaaatggcgtacttgaatcatgacattgatgattctataagagcaggtttattaagaaaagaagagattccaagagaaattgttaaagtatttggagatacttcaaacgaaagattaaatgtcttaattaaagattttataaaaaaatcaaatgataatcttaataatggggtaaaggaaattgggttaagtccagaaataagtgaagcaatgactgaacttagacaatttatgtttaaaaatatatatttaggggatacattaaaggttgaaagaaataaggcgaaatttgttttaaatcaattaattaaacattttgaggaaaatccttatgagatgccagatatttatgtgagcatagctaaaaacgagggcctgaaacgaggagttgctgattatgtggcgggaatgagtgatgattattgcttatcactatttaataaaatatttatccctaagtttgtaatagattaattatatatgagattcatgtcttagaaagtttaaaactataatgaatttaataatattctcaatgaataaagatttgcaataaaaaaaagaggattttaaattaataaaaagaattactttaatatatagtattattcaataaatattattttataactggtgaaactttaaattaaaaaaaaattaatagttttctaattattttagaaggaaaactcgttattatgtcgaataatatataattgccaaaaaaagcagtaggaaggagatgtctccttgcaaatatcagaagaagttcttgaaaggataaaagaacaaaatgacattgttgatattatttcagaggatgtaaggctaaaaaaatcaggtagaaattttatgggattatgtccattccataatgataaatctccatcatttagtgtttcaagtgaaaaacagatatacaaatgtttttcatgtggagaagcaggaaatgtgcttacgtttgttatgaaatataaaaaactcacttttatagaagctgcaaaatatctagcagataaagctaatattccgctacagataaatgataatgaaaatagcgcagtttctagaaagaaagaatttttatataaagtaaatgttgaaacagctagatattattttgctaatttacaaagaattaaaatggcaaaagaatattttttaaagagagggataaaagaagaaactataaagagatttggtttaggctactctcaagatagctggcatggattaacaaactacttaagaacaaaaggatataaagataatctattacttgaagctggattgatctcaaaaagtgagaaatcagggaatgtttatgataaatttagaaatagagtaatgtttcccgtgtttgatgtaagaggaaaagttattggatttggaggtagggttttagatgattcaaaaccaaaatatttaaattcaccagagaccatgatttttcaaaaagggataaatctttatggattaaattttgcaattaagaataagctaaaagaggattacattattatagttgaaggatatatggatttaatatcgcttcaccaatctggtataacaaatgttgtagcatcacttggaactgcacttacagtaaaccaagcaaggcttcttaaaaggtatgttaataaggtaataatttcttatgatgctgatttggctggacagactgctaccttaagaggtctagaaattctaagaggtgctggatttgatgtaaaagtattgatagtaccagatggaaaagatccagatgagtttgtgaggaatcatggaaaggagtcatttctgaagttggcaaatgaagcgcttcctttaattgaatatagaattaagaaagcagctgaaggtataaatctaaatagtggaaatgatttagtagaatatggagaaaaatttgcagaaattctagcagatctaaatcctatagaaaaagatgtatatataaggaaaatttcagaagaaacagcaattaaagaacaggcattatatgacttactttcacaagtaataacaaaaaaacaaaaagaagacaattttgtgaataaaaaggaatattttggaacaaaattatatgtagaacccgcatacttaaaggctgaaagagcattattaaaattaatgttcaaagatgaattttatgatgagattaaaagctccataaaatcaggagattttgtaatagaatcacataataaaatttattcattaatattacaaggcaaaagtgaggatactaatgatataggtaatatagaatcctatgtagaaagtagatgtgacgatatagaaagttctaaagagttgaccaagataagggaacatgagattttagattttactgatagagagcgactaataaaagattatttaaaagaggtaagaggctttaaacttaaactgcaaattgaggatttaaagaaaaagcaaaataggttcgaaaaagaggggaaaattgaagaatctataaaaattgcaatagagcttactaaattatctgaagcacttaaaaagggagagagaggttgaaggttatgacggaaggaggcaataataagatggaacaaaaagctaatggaaaagtaacaaagccaaaagacgataaaaaagataaaaatgctaaaatggcggctgtaaaggaattaattgacaagggtaaaaagaatggttcactaacatataaagaaattatggaagctatggatcatattgatttgagcccagagcaaatagaaaagatatatgaagttttggaaatgacaggtgttgaaataataggtgaaattgctgatacagaaactgaagaagaaattgatttatcggtcccagaaggtatagctatagatgatccagttcgaatgtatttaaaagaaattggaaaagtgcctttattgtcttctgaacaggaaataacttatgcgaaagaaattgaagaaggaaaccaaaaggctaagaaaaaattagctgaagcgaatttaagattagttgtaagtatagctaaaagatatgttggaagaggtatgttattcttggatttaattcaagaaggaaatttaggtcttattaaagctgttgaaaaatttgattacagaaaaggatataaattttcgacttatgctacatggtggattaggcaagcaataacaagagcaatagcagatcaagctagaacaataagaatacctgttcatatggtagaaactataaataagcttattagagtacaaagacaattgctccaagaattaggtagagatccatttccagaagaaatctcgaaggttatggaacttccagtagataaggttcgcgaaattcaaaaaattgcacaagaaccagtttcgttagaaactccaataggtgaagaggaagactctcatttaggagactttatcccagatgatgaagcaccagcaccagctgaagcagcagcatttacaatgcttaaggaacaattaatcaatgtcctagatacattaactcctagagaagaaaaagtattaagattaagatttggacttgatgacggaagagccagaacacttgaagaagtgggaaaagagttcaatgttactagagaaagaattaggcaaattgaagcaaaagctttaagaaaattaagacatccgtcaagaagcaagaaattaaaagattatctagattagtagctaaaagcacctaaaattaggtgcttctttttaaataaggaattaatagatatcaaactttaaaattagacttgtgtaataacataccgaaatcataaatatatttatgatttctagtgaagatatgaacttaaggttttagcaactttgtaaatacattcatctaataagtcgaatccttaaattggatatctaaaatttataagtaagacaaaaaagaggtaaatatggaattaagtaaaagactaaaatggattatagaaaaaattaataaagtagaaataataatggatgttggaacagaccatggatatataccaatatatttagttaaacataatatagctaaaaaagttattgcatcagatattaataaggatccactgaaaaaagctaaaattaatgcagcgcttgatggcgtattagataaggtagatttaagattaggaagtggtctagctgtattaaaaaataaagaagctcaagctgtaataattgcaggaatgggtggcaatttaattagagatatattagagaatgatttagataaggtgaaaaaattagattatttattgcttcaaccagcacaaaatccagaagtattaagagaatatttatatactagcgattatgaaatattagaagaggacatttgcttggatgaagacaagtattatgagatatttaaagttaagtataagagaggtgattatataaagttagagaatatattttatgaaataagtccatttatattaaataaaaaatcaccactatttaaatcatacatagaaagtaaaattgaaaaaaatgaaaaggtaatagattttattaaagataatactgaacatgcaatttcgagaagaaatgaattaatagaaaaaaatgagaagttaaagaagctactaaaaagtttttaggcggtgagattatggtcaaagtaaaggatataggaaaagaaatagaaaaatttgcaccaaaatttttaatggaatcgtatgataatgttggcctaatggttggagatgaagataagactataaacaaggttttattatctttagattgcacaaatgaagtgattgaggaggcagcggatttaagatgtgagttaataataactcatcacccactgctattcaaaagacctaagagtatagttaaaggagatttattggggaacaagttgataaatctaattaaagaagatatagctttatactcttgccataccaatttagatagtgctaaaggcggaattaacgaaactatagttagaatgctaggatttgagtcacaagaaattattgaacctaatgaatctaataattataaagatggcggaattggaagactagttaaattagacgaagaaataatgttgaatgatcttatagaaattattaaaaaaaatttaaatataaaaaatatgaggattgttaggggaaaaaataaagcaaggacaatagctataattaatggcagtggacaagatttcttttataaagcaaaagatcttggtgcagactgtataataacaggggacacaacatatcattttgcatcggatttcaaagaattaggtataagcataatagatgcaggacatttctcaacagagtaccttgtgtttttaaaaacattggattttttaagggaaaaatttaaagatgtagagttcattgcttcaaaaaaaagtgaagatccttatgagtttgtttaataaattaatatttagtaaaactttatattaaggtcataactgcactaaattatttaaatgttaagttctaatgcatataattaattgaaaaagagtttactaaaaaaatgaataggtgcatatactaatagtgtaataataattgtgcggtgaattatggggaaagatcatgattttaataataaaaatagtgaagatttaaaagatgacttgaaaaatttctttaaacatagtaagaaaacaatacgaaatttttttaggggaggaagcagaagaagtaaatatggtggatggaatggtagatttccaccattttttcctagcaagaatcctcttttatttttactttatcctaaattaattgttggtggacttatattattaacgcttctattctgtggcgtaagtttatatggaataatagtaatactattattaacaataatattttttttaatataactataatttagaaatgttgtataaaaaatatatttgcatcttaaaaagatatatgttaatatagattttgcgagtgagacgtgcaatcgctgctagacttagatctaggagaggaaagtccgagctccatagggcagggtgctggataacgtccagtcaaggcgacttgaaggaaagtgcaacagagatataccgcctaagtttacttaggtaagggtggaaaggtgatggtaagagctcaccagcgtgatggagacttcacggctatgtaaaccccacttggagcaagaccgaatagggaggcaattaaggggctgcccgtcccgcctccgggtgcgtcgcttgagcttactggcaacagtaggcctagatagatgattgcttaatacagaactcggcttatggcttatctcgcatatgtaaaataggcagttgagagaatggaaggttaatttcttccgatattcttccgacggctattttttttgttaatttacatgaagatagttaatgatgttgactggtttgaatataaaggtttggactaagttttcagaataatatataattaaaagtattttaagcaataagcattataatgtttgttgctttttttgattactttattagaaattataagaggatgaaaaatttaatttaaatattaaggaatatcacagttattaatttagagatgaacaaataatttcaatcatcaaataaacaatataaaaatatatataatattaatgcaagtaatattaggagttagatatgtctgatttacgtgactgtaatttatattatgatcccgattcggcaaattatttgattgagtatagagggaatttcaaagaacaaatagataagttatcttatgcttgtggggatataattacaggcaatatcggagtaatatctgtacgaagtaatgattttgataggctcctaaatgatgttccagcaattgtattttatgattttaggacaatttatgtattacaagatatctcaccatcatctgtagataatataaataacataaagataaatccctttttagatttgaatgggatgggagtgctaataggaatagtcgatacaggtatagattatttaaatgatgagtttataagagaagatgatacatcaagaataataagtatatgggatcaatctgttcaaagtaatactagtgactctgtatatataggacaaatttattcaaatgatcaaattaatagtgctattgcagctaaaagaaataatggagatccgtatcaaatagttccttccagagatgaagttggacatggaacaaaagttgctgggattataggagcaagaggatataatactgagtttcaaggaattgctaatgcaagtgattttgttattgttaagcttttggaatctactaattttaaaagacaattgcaagaaaatggaattccttatactccggtatataatgcatctgaaattgtagctggagtagaatatttgagaagagtcgcagtagaacgtaagcaaccaatggttatctatctaggtgttggaagcacagaaggtagccatgatggtaacaacttgatttcaagatatataacatccattggaaatagtagaggattgtgcgtagtaaatggagttggaaatgagggggattctcaagggcatgtatcaggatatatgaggaatgtaggagatacaaaagtaatagaactgagaataccaagggaaataaaatttcttccaatttatatatggatacgaagacctaatattgcatcaataaatgtaatttctccgacaggtgaggcttcagcagttatacaatctaaaataaataaagttcaaccagtcagatttgtttttttaaatacagatatgctagtaagattctattcaccagaacacttcacaggacatcaagtaataagtcttacatttagtaatataaagccagggacatggacatttaatttaataggggaatatataacaaatggtagatatgacatatggctgcctcccaaaagtactctgccagaaaatacaatatttctcgaatcagatccatttaccactctgacaataccatcaacagctgtcaatgttatcacagtatcttattatggaaataataatgcattaattgcggcttctggtaaaggatttaatactaatggattgattaacccagatatttcaactataggtgtaaatatattaacaacaaaagttggaggaggagtaacaacattttcaggcagctcagctgctacagcggtagtgactggggcgtgtgcgcttttattacaatgggggattgtagatcataatgatcctactatgtatactaaaaaaattagaacatacataatgtatggtgccaacagaaattcagctaatagatatcccagcagagaaacagggtatggtgattttgatctactaggtattttcaatataatcagtggtttatatagaaataacaaccagagatctaggatgaatattactgataaaaaatatacaaatgaagaccgtgagtttgaagagtattatgtaaataaattatttataagaattccaagggcaggagatgtaaagtttagatgaaggaaggttttagagcaccaataaatattttttctgatgcaaattattatcattatatagttcaatacgaaggtaacattgaggatgaagtttcaaaacagccggggtattatgcgactataattgataatcaatatgctatattatctgcacctgtagagcttgatacaggtacaccgattccggttttttctacagtaatatatagggcctttccagatatatttactctagaagaagtttcgccaatcgaagcatcccaagctaattttttgcaattagagctgccattaagacttacagggagaggagtaaatgtagcaattatagattcaggtattgattatttaaatgatgaatttataagagaaaatgggcagactaaaatagagtacatttgggatcaaactataacttctgagcagcaaactggaaagaatggagttccgtttggaagtgtatacaacaaaggtacaatacaacaagcaatagatgcttttaggtctggacaatcgccttacgatatagttccaaccaaagatgaaataggtcatggaacaaatatggcagggataattggatcagttggaaaaaatcctaatttaaaggggatggttccagaatgcgattttgtggtgataaagcttcttgaaaatattgcttataaaagacggtataatatacaaatacctatatacagcatgttatctcttttttcagcactagaatttttaaatagatactcactagaaaataataagcctatggttatatatatgccattagaaagtaatttaggaggtcataaaggaaatgggtttttagaacaatatatggattttatgtctcaaagtagtgggattgcaatagttaatggctcaggaaaccaaggtgcaagtggaacacatacatcaggtacaatatctcaagttaatgaatcgagaacaatacagctatatatatcgccagagcaaaagaatataatagttgatatctggattgaatcacctaatataatgacattaaatataatatcaccatcaggagagagtactggaactataaatgcagagataacggctatagaaacttattcattcgtatttgaaaccacttcaatggtagtaaattactatgttccagaagaatacacaggtgatcaattaatgagagtaaggttattaaatataacagaaggaatttggcgttttaccctgacaggacagtcaattctaaatggcagatttaatgcatggatacctcaagaaggagttagtattggaggaactaggtttatttcttcagatccatatggaactataagtaatccagcgtgttctgaatacacaattactgcagcagcgtataatcagctaaataataatgttctagattattccggaatagcatttttagaggactatcttaatagaattgatgtggctgcaggagggataaatgcattaactgtagcgcctaataatcaaacggctattgttaatggaacaagtgtatcagcggctatattagcaggggcctgcgctatgttatttcaatggggaattgtagaaggaaatgaccctaatatatattcgcaaacaataaaaacatatattcaaagaggtgcagttcaaagaagtggagatttataccccaatccagtatgggggtatggaatacttaatgtgttgaaaatgtttcaaaatatgcgataaattgcaactccatatttatagtataatataggcacattcttttatagtttagataatttagaatccctaaagtaaatcttatgaaaggcaagtatacaaagatttaattgcataaggcaacttgaatttagggattttaaattattttttatgatctaatgaattatttttatatgaagcatttataaaagcttcaaaaagtttaagcatatttttatcgttataagcagtcataatttcaggatgaaattgcacaccgataacaaaatttttctcacaactctcaatagcctcaatcactttatctttagagtaagccgtaactttaaaaccaggagctaaatctttaattgcttgatgatgaaaggaattaattagcgcagtatttcccaagatctcatataaaattgagccctcaataatttctaaagtatggctagccgctccatcttttgtttgttgatgatgttttatataacaaccactcatatcagataaatcttgatataatgtgccgccaaaagctacatttagaatttgatgacctctacaaattgctaaaataggtttattaagttcataagctatttttacaagtgtcagatcaaactcatctttatcagggtaaatataacccaatttaggcgatggttcttcattatataataaaggatttatatctattccaccagaaagaacgatgccgtcaagtagttcgacttgtcttctaatggattcttcatcagaaagaataggaagtataattggaacaccacctgctttaattacagattcaacataatcattgccaagtgattctacaactgagtgcgaatattgagtttcgtgtttaataactctgtttgaatttatgcctataattggtttgttcatgatttgtatacctcccttagcatatatataacttataatatatatgtataaataaagattgtcaattgtgcataaatggaagaaaaatagggaaaagtcaacaatttataaacaaaatataaataaagtattaatttatatttacaaaatgaataaagtaagtacaatagaagtaatgataacttatttgttactctctagaaagtcatggtattagacaatctgctaatattgtgccttttgtgagtataaattatgaaaaagattgatttaaaatttacgttcaaaaggaaaatatattcgcgtggcagatttctctcacatatgcttaaaaaggcagattagtaaaaaatctcaagcgtcagagtcgcaagcgagtttggtctacatatgatgaaattgaaagtgttgaaatgacatgggggaacatattaattatgaaaaagtttttcaaaacaataatgatagcagttgttattatacaagctataactgtaactgcatttgcgtatgatgaagttaataatatgaagagtatggaaaatcatatttataatcatctcgaaaatagagatactgattttactattttatatacaggggcaaggtcggaatttgaagagaatataagtaattgtattaaggatgcatattcaaaagatgattacttagagagatcttggctagagataaagcctaaagcaaaggtgactgaaaatggtatagagacaactttagatgtaaaatatctgacaactaaggaacaggaaaattatgtagataatgaattaaagagaattactaattctttaattaataaggatatgtcagagttagaaaaagtacaggctataaatgagtatattataaatagatacgaatatgattatactctaaaatctacaagtgtttattctgcattgacaacctcattagctgtatgccaggggtatgcaatgactgcttatagaatgtttaactatgcaggaatagaaaatagaattgtagtcgggaaaattaaggatgtttctcattcatggaatgctgtaaaaattcaaggtaattggtatcatatagatgttactaacaatgattcaagtgataagaataagtactttttagttggagatagtactttaattgaaaataattatacttgggatagagaaaaatatcctaaatcatttaatggatattataaataagcttttatttaagggattgtaacataatcttactgcttaatcgaagtgttgtatataaacattaaaatattataagcaaagcatatatctagttttgattagtatatgcttttttattatccttttatattatttcacaaaaaagacaagagagttttgtaaattctcaatatagaatataaaggattacatatagtaaaatgaatatacagaaaacattaaataaaatataaattgagataattaaagcagaaaagggaggaaataaatatggcagatttgtcactaagacatatttataaaatttatgaaggggatgtaactgcagtaaaagatttcaatctagaaattgaagataaagaatttatagtttttgtagggccatcaggttgtggtaaatctacaactttaagaatgattgcaggacttgaagaaatatctaaaggtgaattatatataggtggaaaattagttaatgatgtagaaccaaaagaaagagatatagcaatggttttccaaaactatgcattatatccacatatgacagtgtatgataatatggcatttgctttgaagttaagaaaagcacctaaagatgaaatagataagaaagttagagaagcagcaaagagattagatattgaacatttgctagacagaaagccaaaggctttatcaggaggtcaaagacaaagagttgcattaggacgtgctattgttagagaaccaaaggtattcttaatggatgagcctttatcaaatcttgatgcaaaactaagagttcaaatgagaacagaaatatcaaagctttatcaaagtttaggaacaacatttatatacgttactcatgatcaggttgaagctttgacaatgggaactagaattgttgtaatgaaggacggtgtaatacaacaagttgatactcctcttaacatatacaatacgccaaataatttatttgttgcaagctttataggaagtcctcaaatgaatttaataaatggtattgtaagtgaaaaggaaggaaagttatattgtaaatttgatgaaaataatatattattgccagaagaaaaagctaaagtattaaaagaaaaaggatatgttaataaggaagtagtatttggtataagacctgagcatttagatgataatgctcaaataattgaaaataaccctgcagcaactttaactggagatgtagaagttgttgaacgtatgggtgctgaaagttacatttactttaagtcaggaaataataatatgactgcaagagttgatggaagtactaaagcagaacctaaagacaagattaaattatatgtagaacatgaaaatattcatgtttttgataaagaaacagagttgagaatttgctagtattaaattagtgacaattgaggtgagggaatgaagggattagtgaaatatttacaagaaatatatgaagattgtgaaataccatttgaagtttatgtggacgatgaaattatatttaaggctaatcctaattcttttagcgaaaatatacttgaagatacattttttattggacccaaaagtttcaaaataaaaacagaaggggaccgcaaggatttcataagaatattagtattttgtatcaaagataggtataaagatagttataacaaaaaagaaaaaatagtttctgagttattacaaggcttaagtatatctaaggaaaagattaaggaaattatgccgccaataaaagaagaaacatttttagttactttaaatttaaaagaaaaagtaacagaggcattagaggcgttaaaaaatgtttataataataatgatgtaaccattcttatatttgaagatacaatcattttaattggaatttttgaagatataaaggagcatgtatctagtataagtgaaacaatatacttctcactttacgaaaagtgttatataagttattgtcatattggggattatgaattattgaacaagttatataatgaaaatatgtataaaattaatttagctaaaaagtataatgtatctcaaatggtatttggatgtaacagccttttatttgaagaagttatggataatttaaatcaggatattaaggaaaaaatactaaataactttaatgaaagtttttcgaagttagatgaagatatgttaaaaactatagaggttttctttaaatcggacttaaatttaagtgaagcttcaaaaggattgtatgttcaccgaaatactctaatttatagattagataagatacaaaaatacacaggttacgatataaggaaatttaatgatgctgcattattcaagatagccttctttatttggattcaaaagaataaaatttaatagatatagctagaaatcttatctgaagatcgttaaaagtaatcttcagataagattttttatttttagtcatataaatataaacaagtaagaataaataaaaaaattgttggtttataagtatcgtaattacaaaaaaatacttaataagacagccattatgtaatcataaatagaaaattaagaaaatataatataatttcaggaatttattgtataaatattccgcgtttgttaaaatgttattaaagttaattaaataactgaattgttatataaacatgattacgaataaaacgaatataatattgtatgcttaaatatctatttaataaagatttttgaattaacgggaaattaaggtaacgataccgaactattataatttagtagtgatgcaggagataaatatgaatataaaggatatagcaaaattagcacaggttggagtcagcactgtttcaagagtattaaataatcatcctgatgttaaagaaagtacaagacaaaagattttggaagtaataaaagaaagcaattatatacctaataatagtgctagaatactaaaacaacaaaacacaaaaaatataggagttttagtaaaaggcgtattcaatccatttttttctcaaatgattaatgtcataggaaatataataaatgaaaatggatatacaatgatattgcatcaaaatgattataagaatgaccaagaggttgaaactttaatagcttttataaaagagaagaaattacaaggaattatctgcttaggcggtaattttgctgatattacagatgactgttttaaagaaataaatgtccctatagtactaacttctgtcaatactgtttcaaaacaaggcaaggaatattattcatcggttggtatagataatgttaaaagttcatatgatgcaacctcatatctgatagaaaaaggtcataaaaaaatagcattaattttaggagaagctgatgatataggcgtaagcatattaagaatgcaaggatatagggaagcattagaaaaaagtaaaataaaaattgatgatgagttaattattgttggtggatattcaagcagaggcgcatataatgaaacactggaattattaaaaagaagaaatgatatcactgcattttttgctctttcagatattatggctataggtgctgctaaagcaattcttgatagtgggttaaaagttcctgaggatatatcaataatcggatttgatggcatggatgaaagtgaatattataatcctagtataacaacagtaaaacagccggacaagctaatggcaactatgagtataaatttattaatatctcagattaatgaaagaaaagaaaaccaacatatattattagaaactaatttaattgagagggattcatgcttcaatttgttaaagtaatggttattgatatctaaagaatattaaaaaggaaaataatatatataatactttaagttattatatatattcctagagggtggaggaatgagaatgaaaagaggtagtggaatcattatgcatattgcatctttgccaggtagatatggaattggaacatttggaaaagaggcatatgaatttgcggattttttgaagaaagcgggtcaaagtttttggcagatacttcccttaggacagactagttatggggattcaccataccagtcattttcggcatttgctggaaatccttattttattgattttgatattttagagtctgaaaatttgataagaaagtccgattatgatgaaataaattttggtgataatccagagcgtataaattatgaattgttatttaaagaaaaattgaaagtattaaaattggcatatgaaaattttaagcagaaacaatctgaggattttaagaattttgaaaaagaagaagatatgtggcttgatgactatgctacatttatggccttaaagaataagtttgacctaaaaagttttcaaacatgggatgctgatattaaattaaggaaaaatgatgttttaaagaactataaagaagaacttaaagatgaaattcaatactggaaatttgtccaatacgaattttttaaacaatggacaaacttgaaaaattatgttaatgaattgggaattaaaattataggtgatatacccatatatgttgcagaggatagcgcagatttgtggagtaatccaaaagtatttttagtagatgaagaaacgttaactccaataaaaatttcaggctgcccacctgacgcattttcttcaactgggcagctttggggaaatcctatttataattgggagtatttggaaggggaaaactataaatggtggataaatagaatcaggcagagcttaaagctttatgatgtaataagaatagatcatttcagaggctttgaggcatactggtccataccttatggagagagaacagctgtaaatggagaatgggtaaaaggaccagaaatgaaattatttaatgcaataagaaaagaacttggagatatagagattatagctgaggatctaggtctattaactgaagatactataaaatttaaaatagagactggttttccaggtatgaaagtattagcatttgccttttcaggtgattgtgaaaatccatatctaccgcataattatgaaagaaattgcgtggcatatactgggactcatgataatgatactataaaaggttggattcaaacgacaggaagtaagaatgaagttgagaatgcagttgaatatttaaatcttacagaaaaagaagggtataattggggatttataagaggaatatggagcagtgttgcagatacatctattgcacttatgcaagacttcttaaatcttggaaatgaaactagaataaatttaccgtctactattggagaaaattggacatggagagcaaaagacggtgtttttactaatgagttagcaaataaaatatatagattaactagaatttatggaaggtgtgagtaagtgtggataaacaaagaataagagatggtatagaaagatatttaaaagtaaaacatgcagtaaagttgaaggatgctcaggattatgaaatttttaatgcgctttcattaactattttggaggagataattgataattggaatgaaacaagtgaaacttataataaaggaagaatggcatattatctatcagcagaatatttaatgggaagagctctaggtaataatttaatgaatttaggtttatacgatgaagttaagtatgttttaaaagagttaaatatagacttaaatagaatcgaagaaatagaagaagatgcaggacttggtaatggtgggcttggaagacttgcagcatgttttgtggaatctgcagcgacattaaacatgcccttagttggatatggaataagatatagcaatgggttatttaaacaaaacattgaaaatgggtttcaaactgaatgtgaagatacatggttaaagtatggggattcatggagtgttagaaaagatgatgaaattcaaataattagatattcagatatgacagtaaaagcagttccttatgatgtacctataattggttatggaactaaaaatataaatactttaagattatggcaatgtgaggctttaagagaatttgacttcaatctattcaataaccaacaatatattgaagctgtatcagcaagaaataaagcagaggatatatcaagagtattatatccaaatgatacagcagaggcaggaaagatattaaggcttaggcaacaatatttcttctcaagtgcgtctatgaaagatatactaaaaaaacataaggctaaatttggagcagatttttctgaatttgtaaaatacaatgtggcacaattaaatgatactcatccaacaatatcaattcttgaatttataagaatattagttgatgaagagtatgtagaattttcagaagcattatcaatagctaaagagttttttggatatacaaaccatacaatacttgctgaggcactagaaaagtgggatataagattaatagaaagattattcccaagaatacttcaaattgcatatcaagttgatgaagcattaatgaatgagttaagacaaaagggatatgacgaaggtgcaatatggaatttcagaattgtcgcaaataatcagatgagaatggccaatttagctatatttgttgggagagctgtaaatggtgttgcagcacttcatacagaaattttaaagaagaatgaattaaatcactggtatcatttatatccaaataaatttcaaaacaaaactaatggaattacaccaagaagatggcttaggctctgcaatgcagaattatccgagcttattacagatttgttaggaagtgaagagtggattaaaaatttaggtcttcttaagggactggagaaatttaaagatgatgatgcagtgcttgagagacttatggaaattaagcatgagaagaaaattcaattagcagactatattaaacaagaagagggaattaatatagatccagattcattctttgatattcagattaagagattacatgaatataagaggcagttattaaatgctttatacattttagatttatattacagaataaaagaaaatccaaatttagatatacccaaaacaacatttatatttggagctaaagcattcccaggatatagaagagctaaggggattgtaaagtttataaatgaaatagctagacttatagataatgactcagaagtttctaagaaaataaaagttgtttttgtccataactatagagtgtcttatgctcaaaaactatttccaggttcagatttatctaaacaaatttcaacggctgggaaagaagcttcagggacaggcaatatgaaatttatgttgaatgctactccaacatttggaacttatgatggtgctaacatagaaattgttcaagaaagtggagaggaaaataactatatatttggacttagagtagaggatattgaaagaattaagcatgactatgatccaaaatggtattatagagaaaatccaagtattaagagagtagttgataccttaatcgatggtacactagatgatggaagaactggatactttgaagatttatataatgctttgttagaggaaagagatcaatattatgtacttgcagattttgattcatttaagcagactcaagaaaaagtgtttgaagattataaggataaaaagaaatgggctcaaaaatgttttgctaatctatatagttcaggaacattttcaagtgatagaactataaagcaatatgcagatgagatttggtatataaaacctgcccatattaaataattattgatttaaaaataaaataattaagagttatggagagagaaaaattttatatccataactctttatttttttttacgtattatagtcatttttaattacttaaaatcaatttttaacacatgaatacggaattggttgaggtgtaaaataattacgtataagtttacatttaaatttgtttacggtattattaatatagaaaaataaggcgtgtattcataaagttagcaagtgaaatcataatttttaggaacttctttttttatcattatagagtaaataggattattttaaagttggaaaaggagattgagtatgaagaaaatagtagtattggatggaagaactttaggaaatgtagactatattaaattaaatgagtttggccaggtgatttattatgatttgacatctgaagaagaagttgcaggaagaattagaaatgctaatattgttttaactaataaagttaagttaaacagggaagatttaaaagatgcgagcgaattggaattaatatgcgaaatggctacaggatataacaatatagatatagaatatgctaaagaaagaaatattgcggtaactaatgtaagaggatattcgactacgactgtagctcaacatacttttgctatgttacttcatttatacgataatataagttattttgataactttgttaaatctggagagtactcaagatatgatatgttcacaaatttagaagcaccatataaagatttatgtggtaaaatatggggaataattggacttggagccattggaaaaagagtagctagaatagctcaagcttttggtacaagagtagtatactattcaacttcaggaaaaaattcagattcagattttgcaagagtggagtttgagtctttgttaaagcaatgtgatattatttcaatacatgctcctttaaatgaaaaaactgaaggattattaaattatgaagcttttactaaaatgaaaaaggatgctgttttaattaatgttggaagaggtcctataattgtggatgaagatttggccagagctttagatgaggagataataggtggtgcagctttggatgtatttaaagaggaacctattccagtagaaaactcactattaaaagtaaaaaataaagataggctgattttgacaccccatgtagcgtgggcaagtgaagaagctagaagtaggttgttttcagatttattagaaaatataagtgcgtataatagaggagaaaaaagaaatagagtagatatttaaagattataagttttggataaattataagaataaactaataaaagcttaaattagcgggaggctttaatgaagaataatagggaaattttttatgggacatcggcattaagattttataacaaaaaagatgttataaatgggaaagttataaaaataaaccctgcattaattactatactggataaattagatgaatcacttgatattgatacaattcaaggtaaggtgattgaagaagtagaaattttgctaaaacaaggtaatataaaaacattacatgtggatataaacttcgatgattatagcaattttggaagtgatggtccaagccttaattctcacatttttaacataagctttcttgaaagattaaatacgatagctggattatatgaggtatttttgaatgtacatttacttacggattatcctaagattcatataaaagatattaagcacataaatgttggggctgtatgttttcagctagaagtagtgaaagatcgccaggaattaaaggaaattatagatgagataattgaaatgggagcttgcgtaagccctgtgattgaggttgtcggaacggatagatttattccaaaaactaagaaagaaatactggaatttatattgccatttcaagataagattggaatgttaacatttcaagtggaggctacaggtgcacgttcaagtaattcatttgggatgttgaattcgaaagaaatagcagattacattaattattttactagaaactttgatggaacagtgcagatgcaaggtggaattactactgaaactataaagtcagccattaaattgggaagcgagtttttagtatgcggtacagaaatatttaataataaattaggatattcttcaatggaagttatagaaaacatgcttaaagaaacagataaagcattgtgtattgaaagaaaagaataagttaaaatattattagtgagaaaagcttgaataatttagatgcaaggtataaatgatttgttcatttataccttcttttaatatgtaaaggaaataattaatatgagagtatttgtctatttttgatacctgatatttacataaagaacttcagctggttttattttttgattagtgttaatatatataagtgctacaagtaataactaaggcacctgaaaggaaataatagacctaaagtgcagaacatgcagatatgatggtccattatttttttaattgtgcttaaaggaggataataaaatatatcatggcaaaagttattattgcggaaaaaccatctgttgctaaaaatattgcagatgcatttaatgtaaaaactagaagagatggttattttgaaggaaatggctattacataacgtgggcgtttggtcatcttttacaattatatgatgcaaaagactatgatgaaaatatgaagggatggaggtttgagaaatttcctttcattccagagcattttttatataaggttaaatgtgatagtgtagacagaactgttgaagataagggtgcaaagaaacagcttggaataataaaatccttaattgataaagaagatgttgatggcattgtatcagctactgacttcgatcgggaagggcaggttatagctgatgaattgtttggctattttaaggtgaaaaagcctatatatagattacttttaaacgagtggacacctgatgaagttaaaagcggaatggaatcactaaaagataataaggaaatgcagccactgcaagatgctggaataggaagacagtggagtgactggataattgggattaatttaacttctgtaagtacactgaaatataaatttgaagaaaacaagactattaatataggaagagtgcttcttccaactttaaagattatttatgatagagataaagaaatagagaattttacagcaacaacttattataagctagtgtcaaacttcaaaacttcagccaatgaagaatttgagggactttattatgagaatgattctgaaaagtttgagaaaaaggaagatttggataaatttatttcaaggcttgaaggagcaactgctaagattattgataagcagacagaattaaaaaaagaatatccaccatacttatttaatttatctaatctgcaaggacatataactagtaaatataagggatggacatcagataaagttcttaaagttgcacagtctctttatgaaaagaagcttactacctatccaagaacggcaagtgtggttttagaagaaagtttaaaggatagagcgaaaaaagttttaaatacattaaaagctggattgccatatgaaaaagatattaaatttagtacatcaaaaagaatttttgatagctcgaaggttgagagccatagtgctataacaccaacatatataaagccatcgggcttatcgtctgatgaaaaaatagtatatgatgctattaaaaatagatttataatgcagtttatgcctatagctgaatttgaagaaacgaaagttacattaaaagctaatgtttcagaaatgaatggaatttttgtttcgaaaggaaaagtaaagcttgtagagggatggaaagtagtagagaaaatagaaagtaaagatgtaattctaccaaaaattgaaatagatgaaactgtagatattgtagattctaaagtgaattctgttactaagaagccacctaagtatcacactgaaaaaacattacttagagtaatggagacttgcggaaaaggtattgaaggaaaagatgaagactcagaagaaatgatgcaggcaattttaagtgggtttagcataggaactccagcgactagagcagaaacaataaagaaattaaaggatataggatacctaaagacaaaaggtaaaaatcttatgtgtacagagcttgggagaaatttggttgagacttttccagtgaaagaattatttgacttggagtatacaggtagattagagaaaactctttcagatatagagaaaggaaagtttgctaaaagtgaatttattaaacttataacagatttcacaatccaatccgtagaattgataaaaaaagatgatgctgcattatcaagatttaaagtagaaatacctaaagatagtgagaatataggaccatgtccagtctgtggaaatccagtaattgaaggtgaaaagagttttggatgcagtaactggaaaaatggatgcaaatatacgatttggaaagatgatagatatatagcatctttcggtaagaaaatatctaaagaaatggttgaacttctgcttaagaatggaaaagtaggatttagaaatcttaagagtaaaaaaggtaatacattttcggcatatttcaaatatgagaaaaatgaggagagtggatactttaattggaagattgaatttatagacaataagtaagggcttgttaaaaagccctaatttattgtgccctaaagaatatattcggttgttaaatttattctaactatcaaccatagttccaccatttacatgaagtacttgtccagtaacataggaggagtcattagatgcaagatatacatatgctggagccaattcgaaaggttggccagctcttttcataggaacgtcagatccaaatttagcaacttcttcagcagaaaagcttgatactataagtggcgtccaaatagggcctggagctacagcattaactctaattcctttggttactatggattgggaaagagaacgagtgaaggttacaattgcgcctttggttgaagaatagtcaattaaagttttactaccttggtaagctgtgacagaagccgtgtttacaattgtacttcctctcttcatgtgtggcaatgcagcttgggttagataaaacattggaaatatattgattgaatatgttgtttttaattgggaagatgatatttcttctatactatcttgaggaaattgaacaccagcattgtttattaaaatatcaatttttcctagtttttcaattgtacattcgactagttttttgcagaaatctttgtaggaaatatcaccaggcatgagaagacagtgtctgccatatttttcaacatattgcttggtttttattgcatcttgatgttcatataaatatgaaattactatatcagctccctctttagcgaaagcaatagctacggctcttccgattccactatcaccgcctgtgattagtgctactttaccttttaatttatcacttcctttataatcaggattatcaaatataggcggtggatccatacgtgcttcaattcctggttgacaatcctgatgttgtggaggaaaatttttgggtaatttatcaaagtctatgtggttcttgtattttaagggcatagctttctccttaaatatatctatactattaataatattatggatttaccaaaccatttgtgaatgaattaattttcaaattaaatgaaaatataaaaataattataataatacatacattttaagtgaatgtatattaaatttatatatagtgtgttataattaataaatatttacatagacaaagctgtctcaaaattaattatgttttgaggcagcttttttatttggagcaaagaataaagaatttatttcaattaaaattaaaaataagaaagagggttggtatagaatgaaaagatatgaagtaagtaaaaatggaaaggtagaaaatgtagctgatgctttttcagaaatatatagtgttgaacttttgatgaaagaaaagcctgttattctggaaaatgaattactaagaaatatacaaaagtattttaaaaatgttaaagttacatctaatagagataacaatatttcatttgcatttatggatcatatattagaatataaaaatgtaaatgcgcctgttggaattgttattagcgtcattgaagaaaagcctgaaattaataaattgagaaaatcattaggacaatcatttgactatgtgaataaagaagaatttgaaaaatgtaatgttagagttttggttacagatataatggctataggattaaattatgctgaaagaatagaactttttcaaaaaactctttattctatagttgaattaattccatgtgaaggcattcattttaatattactgaacaagtaataagtagggaagagtatttaaaaaacaatcctctagatgatgattatgatgttttaattggtatattaaatgtaagattatttaacattgaaaataatgagaatgagtatgtaatggatacattaggattatcagcagtaggtttatgtgatttacaatgccattttaaaaatttagatccaggcgaaatatcgaatattttatattcttatggatattacatttttgaaaatagcgatgttcttgaagaaatagacaccatagaaggaattacggaaaatagtaagtggaaatgtcgacatgaagttgcgcttgttgaacccgaacgtgttgtattagatataaatcctggagaagatttttcatgtggatatagaaattaatcaataatatgtatataagaatttaatttttaattagaactctcttgatttaatgtaaaaacaagagggtttttttacatacgcttaaaaaagcagctgcctaaaaatctttggttaacagccgtctgagattttgttattttatttggcatgtatgtataatgaaaaaaataattcatatttaaaaataactaataataaattatcattttatattgacatataaaacatgggatagtaaacttataaaagtaatttaaaaatttaaagaaatatgtagaaaacaatggcgttttcatttcaaaaaagatatatctagtatgggtataccttctttggagtgaagcgtcttttttattttttaacaacttagaataagcaattgtacttaaaatttaattaaatttattcaagggggaatagaaaatggaattattaaacggcgcagatatgggatttgtaattattagtgcagcgttagtaatgctaatggtgccaggattagctttattttatggaggtatggttaaaagcaaaaatgtattaagtattacagtacatagttatgcagctcttgttattatatctttacaatggatttttataggttatactttagccttcggtccagatgtaaaaggagtaataggtggtttagattggagtttcctaaaaggtataggaatggcgcctaatgcggattatgcaggcacaataccacatttagaatttgtagtatttcagttaatgttttctgcgattactgcagctgtaatttcaggttctgttgctgaacgtatgaatttcccggcgtttataatattgattattttgtggagtacatttgtttatgaccctatttctcattgggtatggggagctaatggatggttaaagaatttaggagtccttgattttgctggaggaaatccagtagagataaactcaggagtttctggacttgttgcggcaattgttgttggtaaaagaaagagagcgatccctgaaccacaccatatacctatggcaatattaggtggagggcttttatggtttggatggtttggattcaatgcaggaagtgctcttgcaatgaattatgtagctgtaaatgcattctttacaactaatacttcagcggctgcaggagcagttgcatgggtactttgtgaatggttgctctataaaaaacctacagccttaggaacagtaagtggagctatagccgggttagttgcaataactcagggggcaggattcgtgagccctatatcagctgtgcttattggagcagttggcggagcattaagctttttcgcaatagctatattgaagaggaaattaggatacgatgatgctttagatgcttttggctgtcatggagtagcaggaatttggggatctatagctacggctatctttgcatcaaaggcaattaattcagcagggagtgatggattaatatatggtaactttgcgcttttaaaagctcatttaatttctacttgtgcaactgccttatatgcagcagttgcgacatttgtaatacttaaagtaatgagtttagtaatgggcttaagagctacttcagaacaggaagcagagggattagacatttctttgcacggagaagaagcttattcaggattaaatatgtagaaacataataataaataatgtataagaatttagtgaaagcaaaatccaggttactaatataacttggattttgtttttttattgtctaggaaagtatagaattttttgattttgaaagccagtgataccaatggttataaggatattggcctgtaaaaaatggtataaagaaagagcgtggcgcagccacttttgttcttctttaggaaattatattccagtaaaattgagggtataacctaaaaaggttgatttttaattttttctatcaaaaataaatataaatttgtcaatttaaatgggaatgtgataataaataagatgatttattaaaatattgctaataaatatgactaatgtcaaaaaaaatgtcatttttgagcatagtttcataaaaagaatataaaatgagatattttggcatattttgcgatataatatgaattgaagttaattatgaggtgggggaaaatatgcataaagcacaaagtcaaattaaatcagtaagtataagattatacttacttattacaattgctatgttagcaataataccagtagttattttaggtatcatttctacaacgacatcaaggaggagtaatgaaaagagttttgatgaaaatagaactttactctcaaatataggacaggaaataataaataataagattacatattatgaagatacattgaaaacattaattgagaataataattttaatattgaagaatcaccatataataaattgaatggagatatgaaattaattaagaagactgatgaaagtattttaaatatatattattcagacaatactggaaaagtattccaaatacttgatagtaaattgccagatgattataacgctacagaaaaatcctggtttaaagagactatagagaatccaaataaatatattattcatagtccttatcaagataaaataactggaaaaagcgcaataacaatatataaggctgtgattaaaaataatgtaccgataggcgttatggctatagatgtagagctaagtgaactagcagatcagttatcaagtataaaatacggacaaaccggagaatttattattactgataaagatggtgtagttatttctgacaatgacaaaactaaaattgctggaacagagccaactgaatacaattgctggaatcagatatcaactggtgataaaggtaaaatcaaattcaattataataatagtacatatgaggggtattttgagacctcggaacttactggatggaagttaatactaaaaatcccatctagtgagctaaggaaatcagaaaatgattcaactatagcatcaattataattatatttgcaatagcgataatcacattaattataactatggctattgctagaagaataagtaaaggagtaaattccttaaaagatggaatggaaagaactgcgaatggagaatttaacaaagaaattattataaataatcatattcgcgaatttataattctagaaaatagttttaataaaatgcagaaaaatattgcaaaattaattaagagtgttgataattcggcaataaatgttaataaaaatgctataaattcagctagtatgagcaaagaagtagcaatatcgatgaatcaggtaagtgagacaataaatcaaatatcaagtggaactatggagtcttctaacaatttagaaatgatatcacacagcatggacttactatctcaatctatgaataagatagaagaagcgactgaaagtgtaaatggtatggcaataaaagcaaatgatttaggtaaagatggaataaagattgtaaagaccgttataaataaatcatatgaaactaaaaaaagtactgaatcagtaaaagatgttgtaagtgaagtttcggaaagtataatgaaaataggcaccatgaataaggcaataagtgcgattacagagcaaacaaatcttttagccttaaatgcagcaatagaagcagctagagcaggagaagcaggaaagggatttgcagtagtcgctgatgaaataagaaagcttgcagaagagacatcagtttcagccaaacaaatagatgaaataataaaagaaataaaaagtaaatcagaattagcagttgacagggtattagaaacaagtggaacagtagatgatcaagagcatgcagttaaagaatcagaagtgatatttatagaaatagtaacagctatagaaagtttaacagaaaaggtgagtaaaatagctgaaggtgtgagcaccataaataatatgaaggatgatgtagttgaaaaagtagaaaacttatcagcgatattagaagaaacagcatcgggaacagaggaagtttcagcgacagcgcaagaagtgacagcgtcaacagaaagctttgttggtaattttaataatttaaaagatatggctgaggaattgaaagaaaagattgaagaatttaagctataaagatataaaatcattatgatatatatgttgtaataataaatttacgtttaagactctagtgagccaagtgataaattaattgataaatgtagaaatttaattaaaaaatatatatttaatgttttataagatataaaggattgttgcaaaatgcaatgatccttttacaatttaaaataaggtctaattagcaaatagttagtgtcagatacaacctagttttcatataatattatattttaagaaaggtgaatatatatgaaaaataaccttaggtttgatagtaatggcaagtttaaaatagttcaatttacagatatacatgaaggaccgagcagagacaaatctatagatcttatgaataagatattagattacgaaaaccccaatatggttatattatcaggagatattattgatggcaaatgtcagacagcagaagatgtaaaaaaagctataaatcatatagcggagccaatggaaaatagaaatgtaccttggtgtatagtttttggtaatcatgatgatgaacataatatgatgacgaaagaagaaatgatgaatttatatatgagctttaaacataatctgagtcaagtggggtataaaacttttgataggataggtaattataatcttcttgtagaaagttcaaaagataaaacgcctaaatttaatatatatatgatagattcaggaaaatacgctcctaccattattggaggatatgattggataaaacttactcaaatatggtggtataaaagaacagcgataaatttgaagaaaaaatataaaagattaatacctgcgcttatgttctttcatatacctttaaagaaatttgaaaaggcatggaagactggattagtaaatggtgaaaggcttgaagatgagagctgtgccaagataaatttatgcttatttaacaaaatagttaaaattggggatgtgaaaggtatatttgtagggcatgatcattttaataattactgtgctgctttagatggtgttaggcttggatatgctggatatactggatacggaggatatggagatgacaaaattcctcgtggtgcaagagtatttttaattaatgaagaaaatccagctgattttaaaacttggacaagaagagagtttgatacagaacttaaaaagtaaattctataaaaaaataattttaggagatatattttcatgaattagtatatatggaattgaaaaatttattgatttttaaatgaatttattagcatggcgataagaaaaaaatatataatatatttaaatttataaatatatactattgaataaatggtattatattgaattaaacgattaaatgatatccatttttacaatattgtgacttaaatttagtgtatataagttgaaaaatgttgtaaaagatgtaataatagaataaaaatgaaaaaaatataatatcaataggcacacttattgaaaaatagggtcgcaaagctatgagtctaaggaaaaatttaattttctatgattgtcaggttgccaaaatgtatctatgaataataaattttatattttaattttggtgtccacaattatgtagacaccatttttgtgctcttaaaacttacaataagaaagctatttttattattttttcatgtgcaaagtatttgctgctagagattcgaagtttgaattataaataatattaaaagatcagaagggagtggagaaggataataaaatataatcatagtaattagtagcaaaactaaaataatttggacaaacagttccacttaatgttgcttataaaatcgcgttgaaagtttgactatgaaggaggcgaaaagattattttttgcgattttaataatctgaaatgatatgagtaaaatagacgaattattaaacgaagtagaagttatagtaaaacaagggataaataaagagggcgtaatagaaattttaaattctctaaaatgttattttccatacgaaatattagataaaatgaaattatatggggactatttacctaaaaataatgaattagaattttcagaagaaaaaagatatcttcattttttatgggatgtactagataaatcacctatgtgcttaattgccaattttgctattccttatagacagatattagcaaaaaaattatttaagtcatgcggaaagaattttatagctgaagaaaatgtacgtttcaatgttcctgacaatatagaaataggagataacgtatttatgaacaaaggtgctttcctagattcaaaaggtggaataacaataggtaactcagtaggaattggcgaaggcgttacaatttttactcattctcatgaggagcatgaacatgaattaaggacatatgcaaaagtagtaattaaagattacgctaaaatatattctaattcaactatattgcctggagtaacaattgaaaaacaaggaatagtagcagcttcttctttagtcggtaaaaatgttgaaaaaaatgagttggtagcgggtataccagcaaaggctatgagagagagaaaaacattagatagaaatcaggaagaattaaaacatatatggttgcataacggtgaatttcaagattaaaaaatttgtacaccttaaggaggaaatgattaatcatgagaatatcatttaaatcaaagttaatggtaataatattgccgctagtaatagttggattgctatcgctgacaggatttgcatatattaattttaggagcatcatagaaagcgaattagtgaattccatgtcattaagaacaacagaagcaactggtcatattaatacatggctgacgagtagaatggcagaagttcaagaaacagctcaaagcccagtgcttaaacaagttttggaaaaaaatcctggtttaaatttaaatagtacagatggatcattaaatataatagatgatttaaatttatcaagatttaattttattaaaaatacatatccagacgaatatgcagcagtgcatatactaaatagcctagagcctaatgaatggagtaacgctgatagtttgaataagctacaagcgagattttataatgtaagcaatggaaaatttgcaactgctaattgggctaaaggtgctgcaacagaagcttcagaaagatattcaaagacaaatggcgttccttatgatgcaatatttaagcctacatattctgaagcttatgataagaatgttgtaatgatggttgcatggaataaagatgcacaaggaaaagttacagccggagctgcctcaagtttggctattgaagcagtagaaaatcaagtgaaaaatctaaaatatggtcaaaaaggttacggaatattattaggaagtgacggaacttttatagttcatccaaataaagattgggccatgaaagagaaaataaatacagttaacgattcagatcttactaaacttaatgaagccattcaaggtgataaaccaggagtttttaaatttggaagtggatctgagaaaaaaattgcattctatgcaaagtcaccgatttctgggtggacagttataaatgttgtttatgaggatgaactttttgcttcgtctaatcatttgatactaattatgattgggatagttatagctattatagtaattttatcagcagctatatttacagcagcaactaagttgatcaaacctttagtacgccttaatgagttcgcggaagttatatctactggagacttaagtggttcaatagaagtaaaatccaaagatgaatttggaaatcttgctacagcgtttaatcatacgatagaagcattaagaggcataattacagatataaataatgaatcatcaaaggtaaatgaagtttcaactaatcttgcaaactcgtgtgatgatagtattaaagtcactggagaagttgctaaagcaatacaagtaatagcagaaaatacaactgagcagtcaagacaagtgactttagctagcgagaaaacaagtgaaatggaagaagtaagtagaattgttgttaataagtgtaatgatatgcttgaaactgctgaagaatcacataacataagtgcggttgcttttgaagcggtggataaagctgttgaaagtatgaagctaattgttgaaaataataaaaccaatttggaagaaagtaaaatgttacttgacagatcaaatgaaattggtaagattgttgaagttataactaatattgcaagtcagactaatttgcttgctttaaatgcagcaatagaagctgctagagctggagagcaaggaaagggatttgccgtagttgcagatgaggtaagaactcttgcggaacaatctgctactgctgctagtcagatttcggctttaataagtggaatacaaaatcaaattgagactattagtaatagtatggatgaaggttctcaggaaattactgttggtatggaaacggcattaaaggctgaaactcattttgataatatagaaaaagcaataagaaacatttttgatgtagttcgagatgtatataattctacggaatctatgattaaaacagcaaaagatacagtagtagaaatgcaagaaacatcaattatatcagaacacacggcatcagcaacagaagaggtatcagcatcagctgaagaacaggctgttactatggacgaaataggagattcagctaatcaattagctaaattggctcacagattaaatgagttagtatcaaaatttaaaataagcaaataaggataaaaaataacagtaagaccatggaattattagtcttactgttattttttataagttaaaggtacaagattaattgaatactatacctttagaaaacaaatatattatttcatatctgttaatatattttccattttattaaactggttactgacatcattatctggctttttagttaaaagactaacgataattacagatagaagtgataatgaaaatcctggaatcatttcatatagaaaactagataaacctaaaacaatccataaaagaactgttataccaccaacaatcattccggataaggcaccccatttagtcattcttttccagtacagacttaataaaagaactggaccaaaagacgaaccaaaaccagcccatgcttggccaacaatatctaaaatagtcttatttggaaggtatgcaagtactgtcgcaaatgctgctatgactaatacagctaatttacctattaccatttgttgtttttcggaagcttctttattaaagaaagctagataaaaatcttttgtaatagaacttgaacaaactaaaagctgagatgaaatagtactcataatagcagctagtactgcagagaatataattcctgtaataaatggatgaaataatatatcaccaagtcgaagaaaaactgtttcagggtcagttaatggagtgttatgttcagtaaaatatacaagacctataataccacttacaacagcacctaaaagacctattgccatccatccaataccaattcttcttgctgattttaattcttttgcagattttattgccatgaaacgaacaataatgtgaggctgtccaaaatagcctaagccccaagctagaaggctaataatactagctatgctagtccctctaaatatatcaaataatttaggatcaattgcttttaccttatttacaaatgttccaggatctacccctatattcatatacgctacaactggaacagtgattaaacatataaacattaaagtcccttggaagaagtcagtaaggctaactgctaagaatccaccataatacgtataaagaacaacaacagatagagtgacaactacacccattgtataagttagcttatatgtatcaacgaataattttcctccagccacaagtcctgatgaaacataaagaataaagaaaacaagtattacgataccagatacaagcctaagtatgttagacttatctttaaaacgattttctaaatagtctggaattgtcatagagtcatttgcaatctctgtgtagactctaaatcttggagccagtagaaggtagttaaagtaggcacctacggttaaaccaattcctatccaaatattagatataccagttaggtaaactgctccaggaagtcccataagcatccaaccgctcatatcacttgcgcctgctgataatgctgtaacaagaggtccgagtcctcttcctcctatcatataatctgaaagattagatgtttttttgtaagagtagtatcctattgtaagcaaaataagtaaatatactcctattgctataatggaccatagtttcatattaaattcccctttctatacatttaatgttgttgatattgttcttagaaatgataagtggataaaataccttttttataaaaacgatatgattatattatcatattatttaaaaatcgacaattaaatttagaagtttatacttcgtgcgttgctttaagttaaaattgttaaatgtgaattgtttacaaaataaagttttaaagcccaaatagtttatataaattaagacttattgtatccagcaaatagagcgcatatattagaacaatctttgattaaatatcatatgatacatcataaaacagtattaggagatgctttatttaatgaaaaaaaagttaaaagtattaactgctttattgatttcgagtataactgccatatctatgtttggctgtagtagcaataataaaactaaggaaggtaaagtaactgtacgcttaaatgaagttacacgttcagttttttacgctcctatgtatgttgcaatgaaagaaggatattttgcagagaatggaatcgaaattgatttacaaacaggtcaaggcgcagataaaactatgcaggcagttttaagtaaatcagcagatattggtttttgtggaccagaacaaactatttacattaataatcaaggaagagaagactacccagtactttttggacagcttacccaaaaagatggttccttcgtggttggacgaactaaggaagataattttaagtggcaaaatattaaaggaaaaaatattataggaggaagacctggtggggttccagaaatggcttttgaatatgctatgaaacacaataatattaacccaaaaacagatgtcaatatggtaaataatatagattttgctgcaactgcaggtgcatttgggcgctacattaaagagcgcctttttttttattagtgcaaaatggctttataactacttcctgagtatctgagttataagaaatataatcaacaaaagaatttataagaagctttctcatagaataatcagcattttcccatagctttttaaaattcaaaagcatagaagtagaagcattaatttctttaatagctgcttttaaattactattagtattttctaattcaaactttttaaatttcaattctttaatctctttatttaattcttcaattctagaagaaagtaaatcatatatgttaggatttaaagaaagcttatcaattaagttttttacctgcagctccttttgagatatctgtttttcatatgatttaatactgcttttatctatagattcagattctaaagattttttatattcttcaatggctttaataagtgagcctttatcatctgtagccttaaagagttctttcataacactcttttctaatttatcaagtcttatgtttttagaatcacaagtattatcacttgggttaatcttatttatacatatataataacgaagaatttctccagtcttcctagaaacgtgaccttgcttttgaatcatccttccaccacacttagcgcaatggagcactgaattaaatacaccatattcgctgccattaacaagtctaggtgcaagatccttattcttatctaattgcctttgaactttaatccataaattatcatcaactacaccttcatgttttgaaacagaaagaatccattcactaatatctttatatttatccttagaatcttttttattgtaacttaatattccattaccatttggatcaccaaatacagttgcacctttgactgaaagataacctataacaagctcagaagatttaacataaacaggatttctaagtaagagctgcaaggcttttatatcccaagcagaatttcttttagttttaatgtcattttgaataagatacttttgaagttttccaaggcttccaagagttaaatatttctcaaataaaagtttaactagagaaatttcttcattaataggagataatttcatcatctttttttgcttagaattattatctaaataatatataggttcagaagaaaaaccaaaagggggagtgccaccaagccatcgaccagttttagcaagctcatacatattgtctttgatacgttcagctatagtttcacgttccaattgagcaaatacgctgctaataaacatcatagcagtacccataggactagaagtgtcaaactgttcacgtattgaaataaaatcaatgccaaggacttttaattcatcaatcaacgttgagaagtcagaaacatttctgctaattctatcaagcctataacaaataattgcatcaaactttttagctgcagcatctttcatcatagatttaaattcaggtctgtttatattaccacctgaaaagccttcatcttcatatatataaatatcatcatagccgttatttttagcataagatttacatagctctatttggttctctacactttcacctttaccagtaaattttgattttctagaataaatagctgctttcatagtatacctccaaagtgttatacactgattgtagtgttatgaataagttaagttaattgagtatagctacatatatttattaaaaagtagtaggaaaaatactatatttcacaactattatatgggacttcctttctctttaatgaagatcttatatgattatatctattttcatcaacaactatagaatgaatcttatattgtagcatttcattagttatattaaaaaaatcacatatctcacatggagtagatatacaattacacaatgcttgaaggaattcatcatcacttataagaaaattagcagcccatgatttagctttatgttcttgcttattcttcataagtttttcaggataatttctagattgaatagttaaattatctaaactagtaaagtgatgccctaactcttcagcgagaatagataaatatttgcatctatcattaacaatagatttttctataattataactggaggaagatctggagctttaaagtaaattccattaaatgaatactgattaagatttctttcctcaaggtgtattttttctttctcaataatacaaaaaatatcatttaattttttcattagtcaatcaccgccattatcagtattaatgatattattataatgcagtaagaacgtatgttcaagacggaaatgtaaagtgtttgaattgaatatagcgtataatttacaaaatatgctataataagtatatattttttgaattttaatatattaaataacaatgtatttagcatataaaagaatattagcagatacaaaatataataagataataatatagattatttataaataatcatcgtatttaaatatttataaggatgtgaactatttgaataaaatcactttaaaaaagataaatattggtgataatagtatattttttaataaaggtatgaatattattactggaagaaatatgtcgggtaaaacattgttgtttaattcaataatgtatatattaggactggaaaagcagtttcctgttgataaatttgattttaggaacttatatatagattttgaagtcaaaaatatagagtttagggtcaaaagagatgttggttcaaataaattaatatttagcggaggaattaacgaagaagttcgagtaaaaagtgattcatactatgaaatttataatagtattttagaaccctcgtttaattttggagaagataaactagcagcaactgagatattaaaatattcgtttatacctgaatttaagatatatagtgataagactgatacaataaagaaaatactaggaataaatgttggatatttaagaaaatcaaaagaacgaataaaagtttttgagcaagaaattaaagatagtgaaagctcatatgatatgttgacaacatatatgttaaatgtaagagagcaaatccatgaattaaagaatatagaagatagtaatattaaagcttttgaaaatatattaaatggtgaatatttgaatatacgaaagaaaaatattgaagataaaaattttatgaaggcatcaatagaggcatataaaaagcttgaaatgagttgtgatgagaaattttataagattaatgataaattgcaaaatgattttcaaaatttgtgtaatgaaattggctttatgaaccattataagttagagaatgaatttctgaatagaagaaatattaagagtgcatctttaggagagaatagattgctacaaattattattacattaattctatcaatgtacagtgatgagagatatgaaaattcaacaggaatattagcaatagatggaattgattacatagaggcatctgcaatatataatattagagattatgtagcaaaaaagtgcaaagaaaataaacttcaatatatagaatttacttgtatgaaagaggatttacctaaagagtggattgttcatgacttaaacatgggggggatgttcaattggctttaaaaaaagacaaacccaatgtagcgatagcagtttcaataggaggtttaattatatcactcttgattttactttttggtaataatattgtagatagatttagcggacctaaattaacactggatactataaaatttgaaaatgaatcaaatgacaagttgaaagaatatcttaaaaataataattcagaattactttcaaatatatcaaattgcacaagagttataacaataaaaaacgatggagctatgccatcaaataacttgaatattgatatagatgttgatgggaagatatgtgattataagcttgacagtacagaagttgcaaaatgtacgataagtgataaaagaatggtattaaatttacaaagattgtctaagaatgcagaattaaaagtaattgtttggatgttagatgaaaaaaacgaatttaaagtaaattacgcagatgataaaaatagtaagaccatggagattgataatagcacaagttataagttatcaagtgtgactattttaggattaattataatatgtatatcatttggagttttgtgtaaagagatgtttgcgaatatatatgtgaagcttgaaaataggaataatgaaagatttgaaaaattaatttcaactttaatcaataacacaagagagcgtgatacggatacggatacaggggaatgcgagtctaggaaaactgatgatgatggaagttttgaaaaagcaaaagaaaagcttatagaaatgattaaagagtctcaaaaagtttaattatttatattaagttattgaaagggatggtattttgagtataaattcaaaagtacagaaattactatattttagttcgggtggcttttgccaaaatccaagatgtaacaaagaattatataaattctttgaaagtggcaaaattacaaacattgaggaacttgcacatattataggacaaagtaaaaaaggacccaggggaaataatgagttagatttactgatgagggacgaatttgataatataattcttctttgtccaacgtgtcatacattaatagataagaatccggacgaatttcctattgaaatgttattaaaatggaaaaaagatcatatagataaaataaaattatgctttattgagccggtatataaatctgcagcagaattaaggaaaatacttgatagtttgttagcacaaaataggataatatttgaagaatacggccctcattcggagtattctattaatttattaacgactgcagaggcaatatggaaacaaaaagccataaatattattatcccgaataataaaaaaattattaatttacttgataaaaataatcatcttattaatcaggatgaaataaatgttgttgaaatgtttagagagcatgtattggaatttgagtataatcaaatatctgatgaacctaatccatatgcaccaatatttccaacagaaattaacaatattttaaggaggtaacttacaatgccagaaggaggaaaatatgaaaaattacctaggccagaaagtgtaaaggctttaattaaatttgtatcagctaattcatttgtttcagatatagaagaattggaccaacaaattttaaaaatcattagggtaggcaaatctaatttaatagtatatttgactaatatttatatagtaagcgaagctgatgttaatgaaatattgcttgagaatagaagtatagattgtattgttacagttagtgcatggaataagtatactagtatggcaaagaatgaagcgaaagaaaagaacataggattatttaagttcaaagaattcttaggagcaatatactatgatggacaagaatttattgattatgaacctaaaaaacatgatgataggactttgtccagacgaaaaatttaatggaatttctttatatttatttggatcaagtatcaaggctataagcagtttcaaagatattgatattatactcatatataataaaaaatataataatattaattcaattattaacttaagaaaaaatatgattgaatattggagaaaagaatgtgatattgtattagatataattttgctagatacttgcgaggaaagagaagtaaagttcataaaaaaaacaaaggcagaaattatttattctaaatgaaatgtaaaaatatatttagaattagaatataaatgataatgagttaaaaattattaaatgcaattattgaaaatagggtgttcataacgaacacctcattttttatccttatatttttgttttatatattcaataaaatcattaatattcatctttagctttttttgaaagatcattataatcagcatcatgataaagagtaatcttagtttttattacgaatcctttttgaatattttacatttacaaaaaagcttgcaactacagaagtactaaaaataattacaagaaatagttttattatggaatatgggcaaactacaatgaaataagtcaatataactggtaagaaaacaaataaaataaatagtagcggccttttgtaatgttttccaagtaataattcgatagaaattaaaattgaaatcagccaaaaaataaatgtaggtacatatataataagcagtattacatttagagcatttaacgtgagaaagtttaggctaataattagcaaaataagagaaacagtaaaaattaatatagaatatataaaggcattacaatatacatcaaaatgatttctgttcaatgcgtcaaatatttccaatgttgaaaaagcataattcttatctataatagagtgcaattgtttgttttttaataattgtaatttattttttatttcctttgatagttctgtaagcaactgacttttcttttctggagtcataataaaactatgagatgtaaaataatctattttttctataatagatttatcaaaatacttatatgataaatacatattgcttattaaatcatgctcatcagtagaattgtttagatagaaatatattgtttttaaaacttgtgcataggaattaattgactggtctaaaaaatctaaatcctgatttttagtttcaagtaaagatttttttatatctttaaatagccagacaaagataatcattgatgctaatacaatgaacagagtataattgccttccacaagtaaattaagcaaatccttcattattaatcgccccattcaaaaatagttatataattactcaaatatatatttgaaaataaaggtgttcgtaatgaacaccttttattaactggcaaattcttcagaacttttcatttcattttcaatggctaaactttctctatactctttagcctcagctaacattgtccattttgattgaatacccattttctctatttgtgatttaacatctttaatattaactttaaagaattcttttttaggattaactttattaacttgatttttgttaaaaattttatgtaattcagtttcaagttttggcgcatcatcgctaaaaatcatgctatgaacatcaaaagtgaaaggtacacttgcatcacctagttcttttactctatctagtggatctaagcgtctagtcataccaattttataaacatcttcaccaaacgaaccgacatttgagattatatatacatgtccagattttgtttgctgtgccatagataaagctctttgattcttttcttcagcttcttgtaatttcttttgtaagtctataagtttagattcatattctgctttttgctgatcgttagcttcttgcaattgtaactgagctttttccataagcttctttaacatctcttcttctttagcggcttcctttatagctttttcataatctcgtctagctctttcttcttctctaatttgttccttgataaggcgttgttcttctttttctttttctttcaattcaaaggcagcaacagcccattttagttcatcaagtctagcttgtaaatattctggagtaattacagcgtttctgaaagcttcacctaaattgttaacaagtatatatgaatcagtaattttttgttttaaaacaccatagtttgtactttttactgttgataaaattgtatcaactttaccattaaaagcatcagtaacaaaattaatagcagtagtctttctattattttcaacataatcacattttgcagctagtccgttttcaaccataaattttgatttttgtcgtgatttctttagttcaattccagcttcggtataaccaaaatcatctgcaagttcatcaaggattccatgagtggggataatatatttattaccataaccctctataacatttttcattgccttggccttttgttccaactctttatggttatttaaagctttgtaagcatcccctgcaatttcttctgcttttatatttgcatctgaaattatttgtttactttgttctagcgcagtggataaaatgttatcatattctacttttcttatttttatttgttcgtccatttgcttttttgcagataatgatttttctttaatattttcagcttctatttgagcaaaggttaataatgtttcatatcttttctttattaactccgcttcattttgagcagtagatagaagttcatcacattttgattgtacgtcgataatatcttgatatttagaaagttcagatattatatcatctttttctcttattgttttatttaagttagatacagtttcatttagtgttttctgcaatttagttttagattttttaataacaaatattgttataattagagctagtataataaaaattagcataataaaaatctccttttatattgatattttgataaaatataacaatctatatttaaaaatatagatgttcataaagaacaccttattttttatctttatatttttgttttatatactcaataaaattattaatctcttctttagcttctttgggaagttcatcataatcagtatcgctatgaagtgcaatagtgatgttaggatcatcagtgtaatttcttatatcagtttttcctaagaggtaatctatagatatttcaaaaaaatcagctatcttttgcagagtaggcatctctggaatttgtttaccactttcatatttagatactgacgtttgacctaaatatagtgttttagctaattctgtttgtgtaagatttttttgtattcgctcttctttcaacctatcagcaaatgttgccattattatcacctcatttaaattgtatactgaatatgatttcaaatctataaatatgactataaagaataatttttgttaaaaaccattgacattatgattttgagtcattattattagagtatagtatatgacttaaaatcataaagggggtgtgagaaatgccaatagatcaattaaaagttttgagaaaacaagctaactttagtcaagaatatttgggaggagagcttgaaatatctcaaagtacatataacaaaaaggaaaatgggataattccattttcattagaagaaataaaagaattaaaaacgattttaaatttagataatagacaaataataaatatttttttagattaaactatgcttttaagtcataattggattttatcaagaataaggagggaaataaatggtagaaaactacagaaatatttaccaaatagcgagagaatgtacaagcttaactcaagaaaaatcatcagaactactagatatatctgttgatagtttaagagcatatgaaggagggaagagaacaccaccagaaaacatagtaattgatatggctaagatatataatcgcccatatttaattttgcagcattatcaaaatactttgataggaaaagaactttttccaaagatagaagttaaacatttagctgaagcagtattaacatttttagatgagcttgaagatctagagagcattaagaaattaatgattaagatttcacgtgatggtcaagttgatgaagatgaaaaagaagattggcaaatgataatgaaaacacttgatgaaatggtatgtgcaattataactataaagtttgctaggtaacacattgtgataagaaaacatattatgaaatgatttatatttacgggggaatggatatgaaaggcgatgaattaaaggtaaccattataggattagaagataaaaaaggctttgatgagcttatggcagagttacaagttgctgctgttatgaaaatgtgtcctccagagctaagacttcaggttttaaataatgctctaaagatattaaaagcaaattaactgattttaaacatattaaaggagaaattcagaagatgaatataatagaaatcttatggaaaataggctatgacgttcttaaaagtgattctgaaaaatgtgaatacacaataatgtatgctccagaaagaaaaagacgtatgtggaagcaaataaaagatggagctattacagttgaaaatgatttacttaatgatatctatacagtaactgttggagaagtttgttttaatcaatgtggagatttatatgttgaatttactgatgtgaatacaaaaaaatgtattgatttttatgaacataaaaacatgaaagaagatgaactttataaataaaaaaagaaccttaattaaaggttcacaagttttagggatacggaatgccatccgtatctccattataaattgaaatggaggaaaagtaaatggttttagaattcttaaatgatttaaaatcaaaagtcagcaaagaagagtttaatattatttttgctatgacaagagaagacataaggtttaataggacaagttttaataaaaagactacacctgaagaatttattgaaatatgtaaaaggtgctgtgttgctttaagtagatgcagctaagttttttagttaatgaaaattacaaataatgaaagtgaggcgagactgtggaaagagattttaaaggcatatggataccaaaagaaatttggctgaatactcacttaactatgaatgaaaaattatttttagttgaaatagatagcttagataatgaaaagggatgttttgcgtctaatgactattttgcagagttttttggcttatctaaaaacaggtgtagtgaaataataaaatctttagagaaaaaaggatttttaagcatttcttataaatacaaagctggcacaaaagcaatagaaaatagaataattaagctactcgaaatatcgatagggggtaatcggaatatcgactgcggtgttcgaaatatcgatagaggtactcgagatatcgacagagggtattcggaaaactgtgaagataataatacaatacttaataatacaattaataatataaatactatatctaaagatatagttagtagcactaaagtgcaacccataatagataagtggaatgaacttggactccaaaagctcatatccataaacaaaggcactaacagatataaattacttcaagcaaggcttaaagaatatggacaagataaaatacttcaagctatagaaaatataaaatgcagcagtttcttaaaaggtcaaaataataagaactggacagtaacctttgattggttagtaaagccaaataattttattaagatcttagaaggcaattatgtagacaaagaaaatccagttaagatagctaagaataaagaggtgcagccactcagatttaataatttcgagccaagaaactatgactatgacaatttagaaaagaagctgcttgggtgggataacgatgattaaaaataaaatggatgaagttttagatggccaaataagcatatttgatttagtgcttaatgaagttaaagagcctaaaaaagagtatgcaccaatagtcaaaagtcataaagataaatttgcagaaattattaatctatataaaccaaatgcagcaagaatagttaaaagaatatatggagcattgcttgtagagcttgaagaaaagacactgtactttaacagtgatggagtaaaagaattggagttaagaaaagatatagatctgcttccagctgatgaaattttatttgtaaatcaagatagaaaattaaatgatatgcagcttgaaaaacttaaaggcatgcatgttgcagaatatattaaacgtaaaggtgatgctaatataataattcaaaagcaagataatacaattgttataaatcctaaaggatggatattagaatacttacaaaaaccaaaatatcatgaagatgaagtatataaaattgaggttcctaaagaaaatataggcttgcatattttaagtgcaaaaacagatattgatgagaagaaaagcactattaagccatcaacttttgctcataatgttatagattttgaggaaaatgaactggtagaaataaagtataaaggcacaaagcatataggcaaggtagtaagaatttataacaatggtgaaaccttaaatgttaattgggatggtaagcagacagccttttactacaaagcagtaaagaagcttaaagaaataaaaatgaaaaatgctatgtaattaattggtggacaacatgaaggaagcccctaaaaaggggcttataggttactgggtaaaagcaaaaaaagattatggataaaagagtaaataaaagagaaataaagttataacgaagaagctacatttaattatatgaagaccaatttcaaataattctaaatgttgataaataattttgcacattaaaaaaaccccaattaatggggccaaaatggattatataaataatatgttagcgaaatcattatattatgtgcaatttgaaaatatttattcagttattgttacagtaccagggcctaatattacaattctatcaacatatttcaaaggaccaatattgtatttaggtgagttttctaataaacggtgtgattccattacttcttgctgaccatccattcttatcataaggttaattccggcagaagtgttttgaatattgtaggtagtattctccattaattttaaatctcttatattataaataccttcagataactggatatttattgttctagcactgactgttagattattcatactaaaagataaaagtaaaagcgcagaaagtataataaatatttttttcatttaataagccctctttctcaattttagagtgtaagttaaatcgctaaaattagtatgtgaaaatataattagagatattcattaataccttgtaggactggaaggcatattagcagggattacaattgttaatgttaaggttactgcaaaagataaataagaagagagtcaattaaagctctcttcctaaaaaggagctataaggatgggaattattaaagatatagttgatatagtggttccaagagtacaaaagagaatggaagaggaaggactagatattaaagaagctttaaataaggagcttagggaaatgggatatattcagaaggatgataaagtggatgagtaaattggagagtaatttggaatgtgtagaaattgttcataaacaaaaagacactacaaagtgtcttttaagcaataagtacttcacctttcccaataattgcaattctataactaggttcaagagcaagcaagctatagtttgctgatttgggtggtaaataaatagattgtatttgacgttgattttcatcaaaaagtgcgatataaacactattatcaggtgatacattttgaatagtataacgatttttttgtgcaacattaagattagacaattgataaataccttccttaaatgtagttgccgcaaatgctggaattaatgcaagagaattaaagaataaacatattaaaattaatattactgaaatatttcttctcataatataagatcaccttccaaattagtagtattggtgtaactttttaatcgataaatacctccccattaccaactatagcaattctgtaatcaggcttaagtggtaataaattatattttccagatttgggagctagtcgtatagcttggatttgaagttgattttcatcataaagaagtatataaacactatctttttgagatacattttgaacactataggtattttctgctgaaaaattaaaatcagctgctttatagataccctctttaaaaatgttagcagcaaatgtagagaatgtcagattaaataataaaaatattgaaattaaaaatataagtataaattttttcatagcatagccacctcaacattttagaataaacaataaatattaataattttattatgtgtacttattaagtaaatatgcagaatgtagatttgacgtggtagtaaatgaaaaaaaatgttctttgaaaattgaataatgcgatatttataatatgtaaaacatttttaattgttagatttatatttaaaaaaggcaatatataatatcctaaaaatagcaggtagtcaatatatactttgaaaattcataaaatttctaccatatgagttttaatatattctgatagacattaaataagttattgtagtttgaatttgcatatgattctagttataatcatttttatgacatgtacagtattttatgggaggtttcgtatgagtgaatttttgaaattagagaattttattgggcattcagatgtaagttatgaagaagttatagttcaatttttacaggataacgaaataacgattgatgattttgagtatgtagggagatgtgattctgagtgcctggaatgtaatgcagaaagatttagtgtctggcgcagagatataggggtcattgaagaagaaaaaattttcactttcgatttagatgccgcggatgaaacattagatttcgctatatacttgtgtaataaatgcaagaaatggactatttatattgaataacacattattcttaaattataaatcgataaaataaataacgtattgtaaaatcgcatttattcaagagattgaatttgcgatttttttaatacgcaattctattattaaacgcaaaatatgccccattaaggggcatacaatggattttataaataataatataatcaacaaccaattatattatgtactatttgaaaaaaagtattcaagtaatttaattcatgatactaatataaaaaataaaggtgttcataatgaacacctataacaattagagaatgaatcatggaaagaagattctctaatcaatctatctagattataacataaaagtattataaaggataggtggaaaaacatgagcgagagagtaaaaagggaattagcattatatagactaagagaaattgaaattgatgatatgaagttgaaagttgaagaattaaaaattggtgagcagcttggagcaatgaattatgaggaaaaagttcaaagctcaatgaaatgcaaaaataatgattatgttatgaatgaaatagaaactttggaaaagaaaataaggtttaatgaaattgctaataaaagaattgataatgcattaaaaagattagatatagatgaagctgaagttatacaaaaagtatttatagaaaagaaaagtataacacgagcatcacaagagttatttaaatcaagaaaaagtattaaaaactccatagatagggcttttcagaagttgaaattagcttaagagggtatcagtaggggtagcagaaaaggtatcataaaggtagcagttagggtagcaagaaaggtatcacaaaggtagcaggaaaagtacctatgcagtactcaaaaaatattatatactgtatgtggttaaaggaataacctattgtgatttttagatgacattttagatttttaaagcacttatttttaggtgcttttttattatgcaattttttataggtaaggaggttaaatcatgcgaaagaagattgaactaaatattagatttatagagaataaagttttatgtgctaaatcgcctataaattgcaaaggctgtgttcataaaagtaattgtgaaaaattagaattgttttattatccttatactaaaaaagaaatagaagaatgttttaaaaatgatgaaaggatcaggtgaggtgggtgaaataatatgggaaggaaaagacctgctaagccaattacaaatacagaaagggttcttgatattcaggattatttaaaatataaaaatgaacgtgattatgttttattcgtagttggtataactactggatatagagcaggtgatttagttaaattaaaagccagagacataagggaagctcttaggagaagtgaatttactatttttgaaggtaagaaaaagaattcaaaaaatattagagaaaaaaacagaaagccaaggacagttgaagtaatacctaaagttacaaagctccttaaagaatacattagggataaaaaggattatgagtatatatttcaatctaggaaaggaattaataaacctattggagtacaggctgttagtaatatcttaaaagaagcaggagaatattttggtttatatgatatttcagctcatagcatgagaaaaacttatgcctacaagatctatgttgaaagtggtaaggatatcgtagcagtgcaaaagttattaggccatagaactactcaggaaacagaattatatataggattagataaagaaaaatatcatcaatattcaaagtcattaagtgattttgtgaggtgatattttttatttttgcatatgaatgtttaattttcgaaggtattaacattcgaggtcaaaaaataaagacatatagaagaagagaaatttaaaaatgaatgtgtgattctcctatataatcaaacattcaaatcgaaaaacacgaacgttcaagggcgacttattcatgtttttaacaatcttttttaatagatttggaggatgaaatgaaagagggaaatatagtaattgaatcaagtgaagtaattaaagatgtaattaatagattaaatgatagtaatagaaaaatatttttatttgatagttttgataattccagaatagctattgatgatgaattgattggtattataatcaattactataggagaaaaataatattataatttataagcaaataaaaggaattttacagtgtaatgtcaaaataaaacatattagagcaataggaggaatatatatgagaacacaaaagtttgatacatttgaggaatatgaagaattttccaataaagagcatatgaggattgtagatgaatgtccaatatgtcatactaagtttagggtaccacaaggatttataattgctgataaggaggatcaaaaaagattactagtgacagaatgtcctaacaaaaagtgtaatggtatttttacagttagatacgattatgagtggtcttataataatcaatataaaatttttaaaatatcggagtattttccatatgtggctcaaataaaaatcgatgataaaataaaaaaattatctccaagtttctataaaatatattgtgaagctacaagagcgaaagaacttggattaaatgaaatatgcggtgttggttatcgaaaagcgttggaatttttaattaaagattattgcataaagaataaccccgacaggaaagaacatatagaaaaattgtttttagctaatgttatcaatacatatattgaaaatgataatattaaaaatatggcagatagggctgtctggatagggaatgatgaaacacattatgttaggaaatgggaaggaaatgatataaacgatttgttaaaacttattgatatcacatgttattggatagtttatacagaaatgactaaagaattaacagattctatgagcaagtaatttagttaaaaatttatttattcagccatcaaattagagaagaataattttttatttcaaacaaggcacttacaaatgtaggtgctttttattatacaatcaattaaacgaggtggaggagtgaaatggctagagagttcgctagagctttttataacagtgtagcgtggaagaaatgcaaagcatcatatataaaatcagtaaatggtttatgtgagaggtgtgagagtccaggatacattgtgcatcataaaaaaggcttaacgcctaacaacatcaatgatcctaacataacacttaatcatgataacttagagtatctatgtttggattgtcataatgcagagcatgacttcaatagagaaaagaaaagtgttactaagaaaggttacaagttcaatgagaaaggagaactgatttataatggatgaactaattcaattaagagatacatttaaatctatagtgactacattagatcaaatgatagagctaggagagaaagagaacaaaggagaaactgttgataaagaaaaacaagaaagtcttttaggaaagttgatgtttcaaatggttaagttagagaatatgaagactgatctatagcccccccatgaaaacttgcagggagtggctttgggagaccgtatagggtacaacaattttcctccgaacgaaattttgaaaataggagggggtatatttttgagcatttccgaacaattagaaagagataaaaagataaagcaggagataaataaaattaaaaagatatttaaggatttcccaaaagataaaactaaagttcttgaagggttaattaatgaagctgcatttatgaaagtatcacttgaagatacgagaacagatcttattaaaaaaggattgactgaattatttgaacagggagaacaatcttttaacagggaaagaccagaggttaaaatttatacgactttcatgcaacgatattcaggagtaatgaaacaattaattgacttgctgccagttgaagttaaaaagcaagaagcagatgcacttatggaatttattaaaaaaggtaaattaaaataatgaattacatagaggaatactataacaaaattgcatcaggtgaaattgttgcatgtaaaagaattaagcaagtgtatgaaatgctgattgataaattacataatccagaaaaatattatccatgggtatttgatgaagagttaggaaatagaccaatagaatttattgaaacattttgcaagcaagctcaaggagagcttggtggagctttgaagttagaattatttcagaaagcaaaacatcaagcagtttttggattcgttcataaagatactagatttagacaatatcaagaggtacttgatattagaggtcggaagaacggaaaaactacagagcttgcagcggatgaaacttacatgctggttggtgatggagaaggatctccggaatgttatattatagccactaaattggatcaatccaaaaagggatttaatgaatgctataaaatgattcagcagtcaccagatttaaataaacatcttaagaaaagaaaatcagatatatattgtccttttaattatggaagccttcaagccttagcaagtaattctaatggtcttgatggcttaaatgcgcatatggttactattgatgaattagcagccataaagaacagagacatatatgatctaatgaagcaatcaatgagtagtagaaggcagccacttttagattgcataactactaatggttttattagaggttcaatatttgactcacaatatgattatgcatgtggtgtgcttgatggaaagataaaggatgatagatttatagcatttatttatgagcttgatgataaggaagaatgggacaaagaagaaatgtggattaaagctaatccaggattaggtccaattaaaaaggttgaatttttaagggattgtgtaaataaagctaaatcagatccagcctttaaagctactgtaatggttaaagattttaacatgaaggaaaactcagcatcagcatggttacgttgggatgagcttaacaatgaagctatttttaatcttaaggaaatgggattcagatatggaattggatgctttgacttagcagaaacaacagatttagcatcagctaaagttttatgtatgagacgagatgatcctaagatttatgttattcaaatgtactttgtaccagaagaaaaattaaatcaagaagaaactaataaagaggatgataatgttccatataagctatgggagcagcaagggttaataagagtttgtccaggtaataaagtaaataaatatgacatgcttgaatggtttaaggaattaagagatctttatgatatttatataccttggattggttatgatccttggcatgtggatgatagtttgcttcaagcatatgaagatgaatttggaaaagatgcaatgattccagttagacagggggcttacacattaagctttccaatgaaggaattaaaagcagatttaattgcagatagaattatttataataataatccaatagataaatggtgtttatctaatatggaaattaaaactgatataaataacaatattcagccaataaaaggtactgataatagaaagcgtattgatggaggtgtttcgcttattattggatatgtagtacttttggataaaatgagtgaatatgaaaatatggtttaaaagagaggtgaaaatatttgggtctatttcaaaatatctttgggaataaaagatctccacagcctactactagatttgaaatgattactgattcaggaaatgggttttatgcctgggatggaaatttatataaaagtgatttggttagagcagcaataagaccaaaggcacaggccataggaaaactgaatcctaaacatatattagattttaatggcaactttaaaattaatccgcagccatatattagatttattcttgaagaacctaatccatatatgaccatgcaaatgatgttagaaaaggtaacaactcagttgatgcttaaccacaatgcttttatttatattaagcgtgatgaacttggatatgcaactgaattgtatccaattccagcaacgtctgtggaattaatagaagggaaagaaggagatctgttcttaagatatacatttatgacaggtaagagaatgacagtcccttattcagatataattcatttaagaagagattttaatgaaagtgacttttttggcgatacaccacaagagacattaaagaatcttatggaagtagtaaatactactgatcaaggaatggtaaaggctataaaaaattctatggttattaagtggattatgaaatttaaatctactttaaggccagaagatagagatatagaagtaagtaaatttgttgacacattcttaagcattaataaaggaaaaggtgtagcagcaacagatccaagatatgatttagagcaaataaagaatgaaagctatgtacctaatgcagctcaaatggatagagcagtattgaggatatatagcttttttaataccaatgaaaatataattcaaagcaaatatacagaagatgaatggaatgcttattatgaagctgaaatagaacctttatcaaagcagctaagtggagagtttacaaggcgtatatttagtaaaaaagaaagaggatttggcaattatataatctttgaagctaacagtctccaatatgcatccatggcaacgaagcttaatttagttcaaatggtggacaggagtgcaatgactcctaatgaatggagagatgttatgaatcttggaccaattgaaggtggagataaacctttaagaaggttagatacaacaacagttggtgatgacttgggaggaggtgaagatgtagatgaaggagaaggaagtaaggcaactgacgacggaaaagatagaaattagatcagtttcagaagggcaaaaaaagactattggaggttatgcagtaaagtataattcaccaacattaatgagagatagatggggagatgaatttcttgaggaaatagcttcaggagcttttgataaatcacttcaaaatagaaatcaaaaagcattatggaatcatgatacttcaaagccactcggaagtgtctcagtagggacactaaggtttaattcagatatgagtggattaaattatgatattgatttgcctaataatacttatggaaatgatgcatatgaaagtgtacagcgtggagatgttgatggttcatcctttggatttagatgtaatgatgatgtatggtcaaaggttcaatatgaaggcaaagaaatatataagagaagtattgtggaagcagatttatttgaagtaagtccatgtacattccctgcatatgacagcagtgatatgtgctgtaggagcttagaaacatttaaggaaagcttaaatcaaaaagaaaatctaagaaaaaagttagttattgaaactttattataaaagaaggaagtgtttataaatgaaaacattaaaagaaatagcatcaagaaaagcagaattaagaacaatgttagaagatcctaaagcagatttagtagcaatagaaaaggaattaagagaattaaatgaaatgcaaaatcaaattgaaacgagggaaagattaattaaggaggcaggagaaataaatgcaggtaaagctggagagaagagagaaacttttattccaggagttaaaaaggaagtggttgaagaaagagaagataaatattccactcttgaatatagaaaagcatttatgaattatgctagaacaggagttatatcggaggaattaagagcagattcaacaactatgactactgatataggagctgttattccgactactataatgaatgaggttgttcagaagttaaaatcttatggacaaatttatagtagaattagaaaaactgcatttaaaggtggagttaaaattcctactgctagtgttaagccaaaagcaacttggaaatcagagggcactttatcagagaagcaaaagaaagaaataaaaacatacattgagtttagttactataagctacaatgcagagtagccacaagtttagaagctgatacagtatcattaccagtatttgaagcaactatagcgtcagatatggcagaagcaatagttgtagcaatagagatctcagttattaagggggatggagttggagagcctaaaggaatattggaacatacaacagaaatacctgaagctcaacaaataacaatttcatcaactgatattggtaagtgggataaatggaaaaagaacatctttgctaaaatcccacttgcatatgaaggtaatggaatttggattatgacaaaagcaacttttgaaggatatattgatggaatggttgataataatggacaacctatagcaagaactaactacggaataacaggatcaccagtaagaagatttggaggatatgatgtgttatgtgttgaagctgattatttgccaaactatgaaaatgctgaagcagatgctgttttcgctttattcgtagatttaaatgagtatatatttaactctaatttacaaatgacaatgaaaagatactttgatgaaaatacagatgaatggatagataaggctactttaattggtgatggaaagttaagagatgcaaatggagttcttttaattaagaagggagcttaagggataagaatattaaaagaaccagtatataatatgctggttttttgtatttaaatttcagaattataagatagaaatcaattataagggggagagtgtatgatattagataaaattaagttagctttaagaatagatgatgacgatctagatgaagaaatacaagattccattgatgcagctaaggcagatttaaagttaagtggaatattagaaagcaagatagttgaaactgatcctttaataattagagctattaaaactttctgtaaatgtgaatttagcacagatgataaagaagccgaaaggtatagagattcttatgaaatgataagggctcacttatccctatctaatgaacatacaacagaggaaacgctatgagtatagaagctttaaataaaagaatagaagtttggggaaacgtagaatttgaaaatgaacttgaggaaaaagattttagaccaggtaaagttaaggataagcctatatgggcatcaataataccacaaacaggttcattgcaaaagcaacaagctaatacaatgttatccaatgtaacacataaaattaaggttagatatagtgcgggtaaggatattacccaagacatgtggctaatacatcaagggcgtagatttgatattaaatatatattagatccttattttgctcatcagtttcttgaaatattctgtgaagaaatcataggaggatagatatatgggtaatgatggatttgatttcagtgaattaactaaatttgagaaaaaattaactgaaaaagttaataatactatgccaaaagagagtagaaaattcataaaaaaagaagctaataatcttaacaaaaaaaataaagcggtttttaaaagtaaaggaataggtcaagaaacaggaaatttacttaaaggattcaaggcaggtaaggcttataaatatagaggtgtgtggtctgcaagagcttttaataatagtccacatgctcatttacttaatgatggctttatgtgggaaccacataaaaatgttgctaaaggacaatcgaataagcaaactggcgaagaaaaatttatccctggatttcatttcatggaagaggctgctaaagcatttgaaagtggtttctattcagatgttgaagaatggttacatgaagtatttataaaggggctgtaatatggttacattgaaacaaataaataaggctataaataatacagtaaaatctgcattagtagatactgagtttgttgatgttgaaattgtatcagaagataccacagaagcattaaaaaaagagacagatggatcatatataaatgttataagaccgtctataaaagttacatttgatactacacaatcaggaaaatttaatagtcaattaaaagaaagaacccttccggtgagggtttatttttttgcaaaagataagaataaacctaaactagataatttggcaatgcaggatttattagagaatgtattcctagaggatgtaaaagtcacagatacattttatatgccgattgctgaagatatagaatgcagcacaactgatggagtattacaagttacttttgatttatattctcttgaggaaatatatgatgattctaacttagaaccaatagaagaattaaacttcaatttaaatttagaagaataggagtgatgatatgacagttacaatgccaaatattgatgtgtcattcagtcaaaaggcagcttcgcttcctgagagaagtgaaagaggttatgcaatattaatagttaaagatgatacaagcgcaatgtttaattataaagaatattccgatataactgagataaacactgataaagaattatatacggaagataatttacaatatttaaaagatatatttacatttgctccatataaggcttgtgtagtaaagattggtggatccgcaactatttctgatgcattaaagattgttatcgagaatgtaaaaacaggatggataacaatggcagatggtgaaacagaagattttacaactttatcaagttggataaaatctcaagtagctaataaaaaaacttataaagcggtagtatacaatgtaacttcaccagatgaaaaacatgtagttaattttgttaatacaaagataacttttagtgatagcaggcgcgaacaaacaggagaaaaatattgtccaagtcttattgggattttagcgaaatgtaatattacacaaggatgcaataactttaaatgcacaaatcttagtaaggtttcagaggctgaggatagaaatgaggctctaggcgctggtaagtttattctaattaatgatggtgcagatgttagaattgcacgtggaattaacagtttaactactacaaatgggaaatcagctacagaagatatgaaagagatagaggtggttgaagcaatggatcttatgcaagatgatatttcaactacatttaaagaagattatctaggcggtggatataagaataaatatgataatcaaattttatttataagtgctgttaatgggtatttcaagaacttggctagtattgatgtacttgatatggaatacgaaaacaaaagcgatataaatgttgaagcacaaagagcagcgtggatagaagcaggaacagctgaagctaaagattggacagatcttcaagtcaaaaaaaatacatttaagagaagcttatttagtaaagcaaatgtaaaaatactacaaagcatggttgatttagactttgaaataaatttagcgtaataaggaggctgaataaattatgggaaatcaagcgttagcaaataaagttttgacaggtagcagcggtaatctttggttcaatggacaacttttagctaatttaagcaagattgaagctaaagtaaaaggtaattttgaaacggttgagttttgcggagataatgcaacatatagtagatataatgggtggtcaggagaaggtacgcttacagtaaaaaaaattgatagtacaatatggaagatttgtgctgatgcatataaaagtggagtcatgccagatataaaattaatatcaagcttaactgataaagcaacaggaaaaagtgaaaaggcaagtatagagggggtagtaataactgaattcttacttgctggatttgaatctaaaaaaataattgaagaggagtttccgtttaactttggagacttcgatcctattgaaactatttaatattaagatgcttttaattaagcatcttttcaattttaaaataaaattttggaggaatattatgaacaaaatgtcattagaggactttattaaaaagggattagagaaaagtgaaggaataaggaaagaagctgatatagagatagaaggatatggacctataacctttataagacctacagaagataatattttagagtatttagatgcacaggcaaatgcaattaaaatgaataaaaatgaagagataataggtacagattataaattattggctaatgcgtctaaagaatttatttatttttcttgcccatttttacaaaatccagaactgcataaagcatggggaataaaagatcctttagatgcaccagttaaggcttttggagttgaaaatttagctggtatagctaaaaagataaaggaagcttttggtgatggcaaaaagactaaagaaaaattaaaaaactaataagagggaatggcaaaggagaaataggaccattattttggctaggttatttctttgaatgtggtcattccctcgaatatttatggagtttacctaagtctcaaaaagagcttttaatggaatacgttatttataaaaatgaattaatgaatactaaaccacagaaaaattaatatgggggtgataatttgtcatcaaaagtaattaataccatattaaatttgaaagataattttagtgatactattcaaaatgttgctaaaaatactcagggatttaagtctggtatgaaggatacagaagaccaggctgttaaaatgaaaaaaactgttagtgaagcttttaatactgttaaagaatctatgctcaggggaattggatttggtgctggtatggatatatgggagtttatgaaagaaggtatagttgaaactgttactttcggaaatgaacttcaaaaatctctaaatggagttatgacatctagcggacttgctgaaactggcatggatagaatgaagaatgtcatgctagatatatacaatgataattttggagagaatttcgaagagataggtgaagcgttaaaagcagtaggagagcagacaggatatactggtgatgatttaaaaggactaactgaaaatgcaatagcattaaaagacacttttggatatgaggtaaaagaatctgttagatcagcatcaactttaatgaaacaatttggaatagatggtgatgaagcatttaatttaattgcacaaggaaaacaagggggattagattttagtggagaaatgttagattctatcaatgaatacagtgtgcaattcaaaaaacttggattaaatgctgaagatatgtttaatattctttcggccggatcagcagaaggtgcatttaatttagataaagtcggtgatgcaattaaagaattctctattagagcaatagatggaagcaaaacaacagcagatggattctctcagcttggatttaatgctgatgatttagcagctaaatttgctcaaggtggtgatagcgcaaaagatacttttgaggatgttattacagctttatcaaatatgaaagatcctttaaaacaaagccaaataggtgttgaattatttggtactcaatttgaagatttaggtataaacgtaattgaaagtttaggaaatgttgatggagagataagcaacacatatgatgcattagcacaaataaataaaataaaataaaatataacgatgtaggtagtgcatttgagggaattaaacgtaatattcaaacaagcgtattaattccaatttcggatgctgcattacctcgtttaaatgattttgcaaattggtttagaaataatattcctgaaataaaagaagatgtaagtggagtaactgatacttttttaagtgttggaggttcaattatagataaaatcatgccttcacttggtgatttaataggctctgcatctaatttggcaagaaccatttataatagtgttgtaccatcattttcagctgtaacacctgatagttgggattctgtaagtgatgcaattaaagatataattgacggagccacaggagtagttaatttcgtaaatgataattggccaacaattgaacctattgtatatagcataattggagcaattgctgcatggcagttagctattgttggagttaatacttggattgggattacaacattcgcgactagtgcatggggaacaatagaacttatgatttggggaatacaaaatgctactacagcgtgggaaggagcacagtggctgttaaatgtcgctatggatgcaaatccaattggagttgtaacgcttgcaatagctggcttaggatttgctatctatgaagttgttaagcattttcaagaaatatgtgattgggcagaaaatgcatgggggaagcttaaaaaattccttggtttagatggatctacagttgatataacaacaaatgaaacagttacatctgtaactaataaaagtggaaatacagtatattcaagaacacctatgaatgcaacaggaacacattattggtctggtggccctactagaatgaatgagtttggtaatggtgaaatggcaatacttccaagtggatcaaaagttattccagcaggtcaaacagataagatattgaataatagtggtgcttcaataattgtgcaattgacagttcaaggaaatatgataggtaatgaagagtttgcagaccaagtaggacaacatatttttaataaattatactatcaaatggttaattcttagaaaggaaagtaggctatgagtaattataatatctatataagtgattacaacagaacaaaagtgttgcaattcccaacaataccaagcaagctgcctgcgttttcgagtgagagtaaaaatgaagagtttgaaacgtattgggatattccatataacttcatagagaaaaagggattgcttcaaggatcatggagcgattggctcccaagagatgcaagcaagtattatttttctaaaagtaaagttaatgcaaaggaaataatcgacttaattgaaaatgctaaaacaaatactgagcctattcgcttagttataaatactccagatggttaccatgtgaatgatacttttagtattgaaaaatttgaacctcaaataatgaaaaatggagattatgaatatactttagggcttaaacaatggagagattacaatactactattgttaaagtttatgaggttggttggcaacaagattcaactggatggtactactacacggatacatcaggaaattattataaagactcttggcagttaatagataatgagtggtatagcttcaatgctgcaggttatgctaggcaatctagttggttgcaggacggaggatattggtattatctaaaagataattgtatgatggctaggaatgagtggattaaatacaatgataaatggtattactttggttcagatggcgcgatgtattttagtggaacggctacaatagatgatgttcaatatacatttggtgatgatggtgcttggattgaaagttaggtggtgttatgtatagacttgttgttaataatcaagacataataaaagatagcaatactatttcgtggggtggagacactgataatataggtagtcaattaacttttgatagtataaaagaaattccaacagggacagtcatacaactgtttaatgattcattagaaatatttagaggaattgcattcaagccaattcaaaggagatggacatggagctatacatgccaggactatagtttttatttaaaaaataataagatatcagttaagcagttttataatataagagcagatgaagcaataaaatcattagctggcgaagcttatttaacttgtgttatagcagatattccaactcaaataagtaaaacatatgtcaatactactatggcacaaataattgatgatattttagatcaagcacaaagtgatcaaggaacaacatattttaaagaaattgaaggtaatgttttatatgttagaaaactttcagaaatgaaaataactcctagattaattttacctaaagatatagatatagaaatgtctatggaaaatatgaaaaataaaataactgttactagcggaaatgatggtaaagcaaaagtggaagcaacagcagaagatgcaagtaaacaaggcttttatggtattttaagcgataatttaactgtagatgataagaacgttgcacaagctcaaaatattgcaaataatacattagctaatagtaataaaatagagtattcatgttctttaaatgatatgtttgctgttgaaaatggtgacttagtaaaaccaaatagaatgatttatttaactgctggtaagagattaaatgggtactataaaataaaaactgcaaatcataaattagaaaatgggattcacaaagttagtattacagttgtttggtaggtgataaaatggatagatatgatacaggcttaatgaaattgttaagggaaagagacaatagagatgctgatgaggtgaggattggaaagataattgcgttagatcctattaaagtttctttatttggcggtgctgccatatttacagaagatgatattaatgcgcagctatatatatgtgaaagcttaaaaggtatagcaggaaaaatcactatagaggatcaggtgcaaaaaagtttttctattaatagagatttaggtgtaaatgataaagttttatgtattcctatttctaatggtcaagcttatgtggcagtggatagagtttaaaggcaggtgatattatttgtttccaaatcaagaggcggttagtacaataactcaattaaacaatgcaaatataatgaatagtggtggtaaatctcctggtttcaattttgagctaggagattttaatgttaaagatggaaaagtcgaaatagtaagcaaatatgaagctttaaagcaatggatacaaaaaactataagaactgataagaataaatacaaaatatataatacaaatgattctgaaaaatatggtgttgattcattattagatttaataatgagtgaatatcctttgccttataagcaagcacagattcaaacaataattacagaagcattactaagaaattctgatataaaatctgtaaataattttgtatttaaaaaagataaaacgttacttaattgtaattttgatgttataagtgtttatggtacgatcacggaaagtgtggtgacgtagaaatgagcgatagcagagctgttatacaagctagattacttagcaatataagtgatgaatataacaaaagcgaaggcgagttcatgtatgatgctgagaaaccagttgctattgaattagaaaatgcatatacagaaattgaaggcgtattagataagagatttgcagaaacagcagctggaaaggatcttgataaagtagtaaaagatgttggattaacacgtaaattaacaactcaatctatcgggaaagttacaattactggagtagtcggctctcctataaataaaggtgaactcgtagctagtgatagtgttagttttgaatttacagaaacattggttatacctgaaagtgggattatagatgtttcagtaaaatgtgtgaagtacggtgaagtaggtaatataccagttggaactattaaatattttccaaagacactttcaggactacaaaaagtaattaataaagaagctatttctaatggatataatgaagagacagatgaagagttaagaaaaagatattatgccaaaattcagactcctgcaacgtctgggaataaatatcattatagaaattgggcattagaggtaacaggcgttggagatgcaagagttgtaccactttgggcaggaaacggaactgtaaaagttgttattataaatgctaataagactggagctgataaaacattagtggatagtgttaaaaagtatatcgatccagttgatggaatgggtgaaggacaagcaccaattggggcaactgtaacagttgtttcagcgattgaaaaagcaataaatataactgcaaatgtgagtataactaatggatttaatcttggaataatacaaacaacttttaagacattggtactagagcatttacaaagtatttcattcaatgcttcatatataagtatagcaaagataggaaaaatattattaagcactgaaggcgttatggattattctgatttaaaaattaatggtgcaatatcaaatattaatttagctgatgaagaaattgcagtaatgggaaatgtaaatttgggggtgatgtgatttgaatgtaactcaattccatgagaagctcaataaacttgaaaataatatatatgtaattgaggaagttgtcaaagtattaaatggcgtttatgaatcagagctacaacatgataatgtaaatctaaagacattgaatgtttatacaggaagtaaacttacaggaaataagattgaagcatattttacatcaactccatcattaactccatggaaaacaataattaaaatttactctaatgtaagccctatttatataagctatgaaacattaggagatcaagttgaggcagaagatgttaataaacttcaggatgcagtcgttgagactcaagaaaatcttaatagtgaaattaatagagctactggggctgaaaaagttctaactgataatttaaatacagaaatatcaagagcaaagagttcagaaaatacgttaacaattaacctgaattctgagattactagagcaaaaagcgcagagtctattttaacaacaaatctagattttgagataaatagagctaaaactaaagaaagttctatagatgcagaattatctaatagatatacaaaggataaagtttatacaaaggatgaagtattacaaaagatatcagaattaataaataacgcgcctaatgttttagatacatttaaagaaattgcagatgcacttggaaatgatcctaattttgctacgactatgactacaatgttagctggcaaagttgataaagtttcaggaaagggacttagcaccaatgattatacagatacagaaaaagcaaatttagcagatacaaataataagaagcatgaacatggaaataaatctgtaatagatgggataacagccacattaattggatattggaatgctgcttacactcatattagtgatagtgttaaacatattacaagtgatgagagatccttatggaataccgtaagtaataaggtagataaaataacgggaaaaagtttatctacaaatgactttgataataactataaaggtaaaattgatgggattagcagtaatgctaacaaagttgaagtaagtacaactaatgggaacataaagatagatggtgctgaaaaaacagtttacacacatccaagtggaactaatccacatggcacaactaaaactgatgttggattggggaatgtaactaacgaccctcaagtaaaaagaagtgaaatgggagctgctagtggagtggccactcttgatagttctggtgtaaatagtcaagctccaaaacctcatactcatgatgatagatattatacagaatcagaagcaaattcaaaatttgcaactaaagacgaaatatctaatgctggatatggtgatatgcttaaaagcatatatgatactaatagcgatgggattatagataatgcagataaattagatggaaaacatgctagtgattttgcacctagtggatatggattaggaggaaaaggtcaaagactaaatacaagtactgatttgaataatatagtagctaatggatggtatgatgtacaaaatcctgtaaatggaccttattcgagtgggtggtttaattttatggttatatgtagcggtgatcaaagctatttaacacaattaggttttggaatgacagtaaatgtaggtcatgtttatatacgaactaaaagtggaagttcgtggtcaacatggatagaactatactctaactcagtgaagccaactccatttgatattggagcaagtccaagtacacataatcatgattcagtctatctaaaaaaaggattgtcatggaatgatttagagggggtatagcatgaattatggtacaaccaaatatggaattaatgaagaagataacatagatgaaataaaactaatatctcctgatcttatgcgatatatgcctgattattatattacatctaaagttatgaaggaattagaacattctaattcgctggagcttggaagattaaattataaaattaaggatataaagaatcaactttggatagatactgcaacatgggggcttacctattgggaaaatgaatatggaattgaaactaatttatctttagggtatgaacaaagacgagaagtacttaaagctaaaaaaagagggcaaggtacaacaactaaacagatgattaaaaatgtagctgaaactttttctggtggagaagtaaacataatacaagataatcctaattatgcttttgtagtccaatttgttggagttaaggggataccaaaaaacatgcagttatttaaagatatgctggaaaatattaaacctgcacatctaggatacacgattaaatatacttataccgtttggaatgtattaaaagaaaataaattgacgtgtaacaatgcaaaattgaagacatgggatgagttaaaagtttatgaatagaaagggctgattaaatgttaacaacaacaaattatggattgaaaaagccagaaggaactgatgttgtaaatatagatgattttaatggtaatgctgatattatagatacaaagctaaaagaaattaactcagcattacctcttaaagctccgctagattctccggggttaacaggagcaccaacagcgccaactcaaactgcaggagataatagtactaaaattgctaatactgcttttgtaactgcagcggtagcgaataaaacaagtataagtgggaatgcaggaacagcaactaagatacagacacctaggaatatagcattagctggagatgttactggttcagccgacttcgatggctcaagaaatatatcgataacaactaccgtagcagatgatagtcataatcacattatagctaatgtagatggattacaaagcgctttaaatgcaatagatacgcaattgttagatatggtgtatcaaacagcaggcggatcagccacagccataacacttacaattaaaggaacgttagtaaatggatatccaataacttttatagcaagtgcaaacaatgggggagctgcaatcactataaatggaaaaaaattatataaaccaggaacaacaacatcaccaaatttaatagcaggaaaggcgtatacagtttggtataactcaactggtgactgtttttttatcaaagctagtgcggaaggaactgcactagcgaaagatgtgcgtaggaatacgacctttagtaatgataatgatactggtataactggaggtcttgatttatctttgttagttccgggaaatataagagctggtattactatagatggcgttacaggtaaatcttccgttgtagatacagcagatgcattattagatcctcaatatttgctaaaaggatatagtggatatgatgatggagttaaaaagtttggaactcttgaaaatatgacaagtgcaattaatatgggaggagcagattcgggtgacttttacaacagttctggaatttgtggtggtgttgccactaatgaatatgtaggtgcatttgatctttatattccaaaggggtactattcaggtaccggtacaaacagactacatattccgaatttaatgccgtggaatatagttaatggtgtaaatattggttggaatggtaagagtattgttggaacagcatcaacttatcaacatgtatctggtgcattggattacacaataccgagatattcaggaactagttcaaatcacacttcttatagctataatatatctttaaatttcgtaccagatttaatactttggttacaagcttcaccaaaaggggcttatgtaattttcccaggatttagttcaagcccagacaatttttggttttatataagcaatcaggtaatatactggtacaatgattcggccagtagttttaaattatcaggtagttggcatgcatggaaatttagttagcattaagtaaagggaaggtgaaaagcaatgaaaacattagcaatatacaataaaaacacaggagaaatattatttacacaatcaggtggaaccgaattagaagataacatattaacaaatttatcttgtgaagttccagatggaaaaataacaaagtcagtaaatattgaaacaaaagaagcaatatttgaagacatacctaaaacagaattagagcttttaaaggaaaaagtaaatgacttagcgcaagcaaatgcagagttaacaagtatagtagcaatgggaaaaagcaatgcttagtataataaatttgattttaaggagagtgtttagaatgcaatttaataaaaatagtggatgtgtaaaagtatgggtaacattgatagtaggcggtacttatgaatataaggatgttcctaaacttttaaatttacaagagcaagtaaaattagttcttgtagatatgggagctatagaagatataactacagaaagtactgcatcataggaaaatagaatgtatcattaaatttaataaaaagtatagaaagtgtataaaaatttaataattataagtagtataatagtaattataaagaaataaaagtataagtgattaattgcaccaatatggtgtttttttattgctcacttttataaagatttcaaataaggtaggtgtaatatgaatgaagaattagtgaaagacaaaattgaaactcacgaaagaaggcttaataatcacggtgataggattgataaacttgaacaggatgggagagaattaaagacagaacttaagaacttatgtgaaaatcttaaaaacttaactagcatgatgaagtggtttataactgcaatgggaggagctttaattagcttctttttttatgcagttcaaacaggaatatttaataaataattggaggtatgtaaaatgataaaacaaattttaggactagtaataagtatattaaaaaataaaacatacatgacagcagctagagaggtatggagcattgtagatgagaactttaggattacagaaaaaattgaagatacatttaaaagtaaaactgaagaattcgataaattattgcttgctaaatttccagaactaactaaggaagatgttatatattttaggcaagcagttgcgggaagcgttaatgtgggtaaggaagcagtattagataattccgtaattatgaaggaattgcaagaatcaaatactaaattacaagcagaaaacgcaagtctaaaagatcaattaagcaaatttcaatcgcttgcagcagcaacagtaaacgtagatgtgcagcaaacagtataagcagagtttttggagtggcctttagggttactcttatttttatatttaaaatgagaaaggatgatactaaatgtttaaaggcatagatataagcaatcataacggaaatataaattttaaccaggtaaaaacagcaggagtagaagttgtttacattaaagctacagaggggacaacatttaaagatagttatttagatactaattattcaaatgcacattacgcaggattaaaaacagggttctatcatttcttagttggaactagtgagccagaaagtcaggctaataatttttataatgccataaaagataaaaccagtgatctcattccaatgctagatgtggaaactaattttgatggactaatggattatattttaagatttattgctaaatttaaagagctatctaatatgcaaataggtatttatacttatactagttttatggataacttagataatagaattgcagattatccattatgggaagcaaactataataatgatccatggagattaaattctaatttcttcactaatagagtaggacaccaatatagtgaaacaggatctgtaagcggaataaatacagaatgtgatatgaatgagtttaatgatggaatattaaataaaactactggatatgttgttacaaactatttacctaatggctatcaaggagataatagttttaatggtgttgatgctgattatgtgctccaatattttaaaggagttagatgttattttaggggaaacgaaaaaggggtatggattgaaactcaaaatctatctatgagcaaatgcctagagctaaaagaaactttgggaagctggttttatgatataaagtaatatggtataatgattattactaaattgcatatactctgtttagtaaaggtagactaggtagaatacttagtctaccttttttgctttaatataataattcttataaatcagatgaaaatagtcttgtataatttgtggaattatgatattataatgttacacacaaagctaacagcgatagtggatagcgttagactcccaagataattacaagattcttttttaagcattaagtcttgtagggtagtaaagagaaatctttattacccttatttttttgcaaaaaaaagagatagcaaaaaaatattaggagagtaatgtccaaagctatctctttatttattaaaaaataggaaatcgtatcttaattcttaacactattaagataaaatatacataaaattataaaaatatattctaataaaataattcattaacacgattttaagagaataaatcttaaatttaagtatttaaatagctttccattctatcaaatatatttctagatggcacattgttttgataacaatatctatataaagttcttttagatatatccaaagatttacacaacttatccttattaatgtggatatttttattaagtacggtggataaatattgatgaaagttatccatagattctaaatacggatcgtaaaaatatttactattaatattaaaataactagctagttttatcgattgctcttttgtggggaatagctctccacgctcatattttgatatactcgatttgctaatacctatagttagtgacaattctttttgtgttaaattatttaactttcttaatctaatcaaattttcagcaatcgtatttgctggcagatctttaaactcatcttttaaatcaattctcaaaatacagttttctaaaatcgctttttcatgtaccgagcatttaaaggcggtacaggtgattatgtggctctctttgaacctacagcttctgcaattcagaaagaaggaactggatatattcttgcatctgttggtgaagaatcaggattaattccttatacttgttattttacaacaaaatcttatatggataaaaatccacaagtaatacaagggttcacaaatgctatctataaaggtcagcagtggttttttagtcatagtacagaggaagttgcagatagcataattgattattttccaggtacagataaagatacaattatgacagttatagataactataaaaagattgatgctatagctcatacacctgaaattaaagaagaaaatttaaatagacttatggatataattactgattatgattcaagcttaatgccgcaaagacctgaatttagcaaaattgtagataattcttttgctgaaaaagcagctaaataaaggtcacataaagatgaaaaggtggtgattttatttgagcttgttagaaatatcaaatatatcaatgaattatcattctattaaaggtgaaacacaggctttaaataatgttaattttcaagtagatgatggtaaatttatttctattttaggaccgtcaggatgcggaaaatctacattattaaatataatgagtggactgttagaaccatctaatgggagcgtattatacaaaggtgaagatgtaaaaaagaatttggataagataggatatatgtttcaaaaggatcatttatttgaatggaatacggtttgggaaaatgtaatcttaggattaaagataaaaaagcagctaaatagtgaatcaaaagaaagagtaagtggattattagatgcttatgggttaacgagatttaagaaccatcatcctagtgaactttcaggtggtatgaggcaaagagttgcacttataaggactttagcattaaatccagagatactctttttagatgaaccattttcagcactagattatcaatcgaggcttttagtatgtgatgatgtttataagataataaaaacagaaaaaaagacagcaataatggtgacacatgatatagcagaagcgatttctttgtctgaaaaagtaatagtattatctaagagaccatctagtgtgaaggcagaaattcctatacattttagcgatgaagaattgactcctttccaaaagagaagagctccagagtttagtgactattttaatatgttatggaaggagttgaatgatggaaatggctaagaaaagtgtaaatgttagtgaagcaaataatatgtctaaggaacatgaaatatatttgaataaggtaaagaaaacaaaaagaaaaattttaattactagaattcttatattggttattttcatagccttatggcaaatagctgcaaatcttaagtggatcgatccgtttcttacttctagtccaactagagtaattgaatcatttgtatctttatatgaaggtggaggtttaattaagcatatcgcagtcacatgctatgaaactatcttaggattttctttaggaacaatactaggcgcactaattgcagtaatcttatggtggagcccttttgtatcaaaaatactagatccatatttggtagttttaaatgcacttcctaaagttgctttggctccaataataatattttggattggaaatggtattccagcaataatagtgattgctcttttaatatcagtaataacaacaattataggtgtattaactggatttaatgaaatagataaagagaaaattatgcttatgaatacttttagagcgacaaaaatacagatattaagatatttaatatttccatactctattcctatcctcatatcagcgctaaagataaatgttgggttatcttgggttggggtaataatgggagaatttttagtagcgaagaatggtcttggatttttgatagtatatggaggacaagtggctcagctagatatggtaatgatgagcattgtaatattatcagcaattgcatttatcatgtatgaggtggttgcaatagtagaaaataaactcgtaaaggatagaagttaaaagtatactattaaactccacaaatactctcttaaaacgacttatttatataagaaataagtcgttttaatttttataatgaataaaattaaacatatttttagaaacttatatttaaagtgcaattaatatataatactgaaaatataaggatatttaacaaaaaggtaacctttacttaaagtgtaaaggaattttacttatcaatgcaatgatggtaaattaaattataaagggcatattaagaatagagagaagttggttttttaacaaatatgcttaaataattggagtgtgataaaattgaagctatttagagaagcactaattatatttggaatctatctgtcaggagaacttatatcatcgatgcttcatctaccgataccaggaaatatattaggaatgataatattatttatattattatacacaaaggtgattaaagtggatagtatttccaatataacaaattttctactggatcatctggcatttttctttattccagcaggagtaggactaatgacgtcgcttgggataataaaatccacatggtggcaattattattagtatgtatattgacgactataataataattggggtgactggtattgtcgttcagactatttcaagaaagccaagaaaaaatatttagcttacgtacagataaagtcataagaaaagaggaaaatatatgcaaatattaataaacaatgttttatttggactagtactttcactcgcggcttttgaagttggtatattcattaacagaaatacgagaataccaattttaaatccactactaattgcaataggaattataatatgttttttgtttgcatttcatattgattttgatacatataataaaggtggtcaatttataaatatgtttcttggaccatcaactgttgtacttgcagtgcctttatataaacagctggatcttttgaaaaagaatgctaaagctattttaacaggtatatttgttggtagcgctataggaataatttctataataggaatatcttatttagttggacttaatgcaagtgtaataaaatcattagttccaaaatcagtaacaactcctataggaatatcaataagcagtcaattaggaggagttgttccaataacagtccttgcaattataatcacaggtatagttggtgctgtatttggaccgactatatgtaaaatttttaggataaaagataaggttgcagttggtgtatctataggaacggcatctcatgcagttggcactagtaaggctttagagcttggggaagtagaaggggcaatgagtagtctatcaattggcattgcaggaataatgacagtgataattgctccgttagtatataatttagcattatacatgtatcatataataaaataaaagcttaaaaatactaataaaagtaaacagtaaaaataacgggttattctaaagaaattatttagaaataatccgttattttcttataagtggcaatatatgaagtggagtaggcagattataaggtaaatataagtattagaatttacaaaaaatatatttatacatgtatattataaataatgggactataaaagaggtttagtaatatttacttgttgattataggaagaaaagcaaattataattatttaagatagagtaattatgaataatttaaaaaatgatagtttatgatattaaaaaattaatgctggtgtaggagaagattaaatatggctcacgatgatgaagttcttataacttatggactagggtatgcttttgaaagaagtaaattgcttattatatctgaagttgaggaaaaagttgtatccaaaaaagaagtaaatattatggaagaaataaatatagttaacaaatttaaagaaaagttagatagtaaatgtgatttgaaatttcctaaaagctacttaactaatgtggaagaagttttagaagaaaaagtatcaaagactatacctataattacatcaataaaagccaaagatgtggacaagcaggatcatcttatggatgagtatgtaaaaaaggatctaagccagatgaggctgagaaaagaagggtatatccaaaaagattcaactttgattaaaaaatatttagatagttgtagtgaaaatacatacgctaagaatattaaagaaaaatccttgaagtataacaaaatgattcttaagataattttaacaagtagttttggagatgaatttggagattttttgagtaagcgaggacaagctactattttagaagaaatagataaaaatgtaggtgagcagttagagaatttacttaagaaggactatttaataaaaaagaagtacagtgaattagatttcttgaatatgttattgtttcttgaggaatggcaaaggaaatattttaaatgggatggaaagtatacggatttaatattttcaatcaacaaggatggaagaaaatacaaggggagaaaagacgaaataaaagattctgttatttctttcattaaagagaagaggtatttgtatcttccatttgggaaatataatgatgataatatttttataaacttaagtgatgaaagatattgtagcataaatgaaaatgatgagatcagatcacaatatgttattttagaaaaaaaggagaataatttatatcaaatagtatccaatgagtataaaaaaatagatttagaagagaattcagaactaggatatttactttcttatgacaatgatactgtttatatttccctagttgtatatgacaagaagcatgaaaaagtaagttgtaaatataataataaatttactgcttttaaatctaaaatgattgaagaattagaaaaacattttatattataagtaagttcataaaattacattaattatttacttggcggacataggtgagctgggttattttaatttgtaaatttcggtttttagctacatacaataaggctgttttaaattaattaggtatatatatatcttaattgctttaaaacagccttattaattaatagaatgtgttgttatttttgaggagtatattcttgatagggcatttgaattgtaactcctgtttcatcaaatttataatttgtattttcaagaggatttttattagcaactaagttcattcctatggaataaagggcttcagctgtttgattaggatcctgaaaaacagtgcctgtcataacacctttattaattaggtctttagctgctgggattccatcaattccgaaaacaggtatatattttgatttatcttctttattgtatccgtatttctgtaatgcttcaattgcccctatagccatggcatcattatttgaaattattgcctcgattttatctccatatctcaaaaatagtaattcagtagaatctttggcacatatttcatcccaataacagaatttagataaaatttcttgtgttctaattccagcatcattaatagttgagatagagtatgtacttcttgcatttgttacagtactattatttgggccctttaacataaaatattgtaatacgttatcaccatttctatccatagtttttttatcggagttccattctttaacaattaaatttccttgcaaaatgccagattgatcagcatttgttgatacaacaagagctctattataagatttgatgggctcagtatcaaaaggtactgtattaaatagaatcacaggaatatttctttgttttgctttcctaataactgattctacagtatttttatctaagctgactaaatttatcaataaaagatcgtaatcactttggagcgctgaatctaataaagcattttgtataccttgatttcttctaccatccaaaaaagtaaagctaacagaatctttgtttttattttgaatttcctccaagctgtttcttactaaagagatataaggatcatcgaaagcaaataaaagtgttgcaacctttactggcttcttcgggataacttgtgcatttgcatataaagcagttttaagattataagtaggtataatagctaatataattatgaacgatactatcttttttaatattctcatttcaatcctccatatgacaatttcaaactataatatttattattatattgtcttttaatattaaatttattctacattgaaaatatattatataaataagaaagcagttacatggcaaaagacaatgtaactgctgtaaacttaatgataaatataaaataaattgaggattattattttttatgtactttttttttcttttttactgaatatccaaatgtgcccaatggtttagcgtttaagccataatattcaccatggctataacaaatcaagttagctttgttaaagcatatcttaccatttgaatcaattaagtcttcgtcgacctttacgtttgttacttcaaacaggaatagatcatgtgtacctagaggtgtaattgattttaacttacattctaaagctatcggcgatttttgcaatgaaggtgtggatatactttcaccgttattaagttgcaaaccaaaatgtttaattttatcttccttctttccagagcgaactccacaataatcaacgatcttaaccatttctctagttggcaaattaataacgcattcaccactttcttttatgtaatcataagataatctctcaggtcgtattcccatagctattataggttctttagtacaaacagtacttacccagccaactgtaaaaacattaactttatcatctttgttttttgatgtgacaagtactacaggcgtgggattaagcataacactgcctttaaaattcaatttattcatgttaattactccttaaataaaagcatcttcaaatacctaggaagaatacaacctatttttgaagatgcttaagatatattatagaaattaagtaaagttatttaattatcttcttcttctgttagaacggctatagtaatttttattcttgcgtcttgaattagatgcagcatttttaataagagcaataagagttacgataatagccaaacctactaaagtagaaatgtagataattaaattatctttaattattgaacctagtgaaatatcaactgaacctgtaacttcttcagaatgatttcttgtactataagtaagtttagtatttttattgaatagtaaactccatgcagtagaatctgttcctttataagtaatctgagattcagaatcgtttatagcatttttataatagttcacatcttgagtcaatttaattggaacagagatagtttttgtaggcccaaataatataaatggtttatattttacatcagcggttccaacactttcaccatttgctttataaacttcttttttagcaccatagctataatccataatagcatccatatcattaaattttgtcatatctgcattatcaatttgtctacttttaagaacaataccaattaactgacgcccatctctatcataaacagtcgctaaacaaccgccagcttcattagttgtaccagttttaccagcaaggttaccatttttaccaagtgttaggtttctattttctaaaattattctagaattctttaaagttataggagctttttcaagttccattgtttctctttcccaaggatttgcaaaagctgccttcataattattgaaaggtcatatgctgtagtgtaatgatttggatcatgaagtccattaggagtaacaaagttactattattagctccaagttcttttgcttttttattcattaattcagcaaatgatttaacatctccggaaatattgtctgctattacatatgcagtatcattaccagaaaaaagtagtaagcccttcattatatcatcggaagttactttgtcaccaggctgcatagtattatgcatataatttaaatttaaagagtattcaggttgttcctttgcagatttagtatattcaagctgatctgctttgtctttgctttcagctaataataagccagttaaaagttttgttgtactagcaggatatctcttgctgtcagcatccttgcaataaattatctctcctgtttctaaatccatagttaaagcagcttcagctttaatgtttggtaagttctctgatgaagtttcagtattaggttttgcagaattgcttgctgcataacttgccatacttaatggactaaataaagaaagagaaagggttaatgcaaatgcttttaaaattaaattttttttcaagtcaaatctctccacttcttttaaacatatataaaataataatcttttttaacatgccttaagtataataaaacattttaagtataacatttatgtaatgctataacaataaatgttatgtaaaaagttacaaacaatatatgagaatttacaattttgtaatatttactttagtctttgtattatagaattttttgcttttaattcgaaattatcattcaagttttctaattttacatcttctccgtatttgttcttcaaagctaatgttagaagcctatctgcaaattctggattttttgaaagaaaagagccatgaaaatacgaaccaaatgtatttttatagatacatccttcatatccatcttcaccattattgccatatccgtgaatgcattttccaaggggagtatggtcatttatatatgttctaccagaatgattttcaaatccaacataagtttcattaaattcttcgttaaatatttctgtatttccaataaatctagtatccccgccttcggtatatagatttaaaataccaagtccatctattttttctccatttggagcagtgtagtatttacctaataattgatatccgccgcatatagctagcataactttgccatcttcaatataacttgttaaagcgtctttctttatctcatttaaatcattagagactatagactgttcatagtcttgaccaccaccgaagaagatgatgtccacattgtctttatctatgttttcacctattgaagtatttattatatctacatcaattcctctaagggctgctctatgttttaaaatgagtacattacctacgtcaccatatacatttagtaaatccggatataaatgacaaatagttaattccataatagtattctccttatcttaccaaagtttttttatataaccttttgaatgaagatattttctataattaatcattgcagtataagttgctaatatatatatttttttagatgcagattccttaattttatctgtaagctcttcataatcttcttttaaaataaatttatctacatttaatccagcaacctttaatcttactgccatatcatacattctaattcctgatacaaaaatatcttctatttttaaactagatattttttcgaagtctacatcccaaatccaagagacatcacgtccgtcagcgtaattatcatttaacatgaaaaccgctgaaaattcactcgtattaagagcaagggtatctaaagcttggttatatccagcaggattttttactaatataatttgtacatctttattatcaatagatatttgctcttgtctgccaaagcttgaactttgattttgaagagaagctttaattactgagtcttctattccaagttcttttgaaatggcaaatgcacataaggcgttgtaaatattataagcacctgattggcttataaaaacttcagtgtcattaattaatacagaagagttttcaggtgttaaatcaaaaattttatttacagcataatcaagttcggaacgcttataaccacattcaggacagtaaaaatcgcctaagtgattataagtaactaggttatatgagtaaggcgccttacagaacttgcagaattttgcatcagcatttatttccaatgtagcatcttctttaataggtgtattaaaaccataatatactactggattttttacatctaactttccgagcaaagattcatcaccattcaaaactagttttgactcaggaactttagtcacaccttctaaaattttaacaagagttgtataaacctctccatatctatctagctgatccctaaataagttagttacagttattatttcaggggttatatattctgtaatgaattttacattagcctcatcaacttctattaccgcataaggatattcttttttcttaaaaaaagaatagttggaaataaaacaagctacgatacctgggtataaattggctccagtgctgtttgttataacgtgtaatttattttcctttaggatattgtaaatcatgcttgtagttgttgtttttccattagttccagtaactaaaattaccttgtatcccttgctaacatgttttaagattgatttatcaatttttaaagctatcttaccaggaaaattacttccgccttttacaatatgttttgcagaaaacgcagtaatttttgatagtaatatgcttaaaatagatttaatattaatttcactcaccgcccaattctagttatatataagaatgattaacacaataaagtaatattaatcatttttatacaattaaacaataaaataatcaaaataagtatagcataaaatttaagaagtacgaaaacttttttagcaattgaatagatataggttgtttttcggaaatttaaagaaaaagtgcaagaattcaaggttcagttagcctaacataattgttttattgatgaatataccatataattagaagtaataaagaattttacgaggtgctattattatgattagggtaacagttaatataaatggtatgaattataacttaaaaggggaaaaagacgaaaaatatttgcttggggtagcaaattttgttgatacaagaattaaagaaattttgtctaagaaggctagttttagtacaacagatgcttctgttttggcggcggtaaatatagctgatgaactttacgagtgtgatttagaattagataaagcagttaaaataaaagaagctattagtagtgaaaattcttctttaaagaagaaagtagacgagcttagtttgcaattagaaaatataaataaggaaaaatcagaacttcaaagtaattttcagaagaaagaagaagagctacatgggaaatataataatgtagaagtaaaatttagttcattaagtgatgaaattaataaactgaaaattgaaaatgaaaagctgaaaaaagaaaataaattaataactgatgagaataagagaaataagaatagtaatgaagtcttaacaaaagatatttccgactataaagagaagagcaagattctttataagaagatagatgaggccaaaaacaaagagcatagattagataagcaagtgcaacaagctaatgaacaagtaagtagtttaactagcgaacttactaaagcgagaaaagaaaaagatatggtaactgaacaattaaacgaaatgactgccgtaaattttgagttagataaacaaataaaagaacttactcaaactaagttaaatttagaaaataagatgcttctattacaagaaaagaatatcacgctagaagctgattataataatgtttgtgagcaattaaaaaaagcaagcgaaaacttaaaatatgaaattaataataaagaggctataaacaaagaatatacttcatgtaaagcaaatttagaaaaattaaatgaggattatcataaatgtgctaaagaacttgcggggcataaggaaaagttagaaaatcaaattacgactaataatgcaataacatctaaggctagagaagaaaaagaaatactaaaaaataaaattacagaattattactaagtgaagaagaattgaataagagaattaaaaaattacttgaaagagagcaggaattaaataatagtctaaaacttgaaaaagataatgctgttagattaacaaaacaaattcaagataataatatggaaaaagctgatcttaataagcagattaatgatttatttgaagaatcagaaaaagaaattacagaatgtaagcaaaaattaagtaagctaaataaagaaaatgaagcattggtaaatcaaattgatttattaaatgaagaaaaggatactttagtaagtgaaattaataaattaaagaaagaacaagatattttgaataatgaaattaaaaatatcaatgatactaacgataaattatcacaagaaatagagaattctgatagagaaaaagaaagattagaagaggaattaaaaataacaagaaatgataatgaaaagctaaaaggtgaacttaaagaagttcatgaagaaaaagaagtagaagttaatattaaggtaaaagagattgaggaagtaagcaatacattagagagtaaagaaaatgacttaagaagaattaaagaagaattagcaagtagagagagcgctttagctagattagaaaaggaattggaagataaagaggggattttcctaaaattaaaaagggaaatagaagctaaggaaaaagatttgaatacaagtaaggtatcaatagatgatttacaaggaaagatgtcaataatagctaaagaaaaagaagaattagctaatgaaaatgataaacttaatcaagaagcaagaacttttcacaataggttatttgagctacaagcagaaataataaataaagaaatagaaattgcaagagctaaaaaagaacaggtaggtcctattgtaaaaaagaaaagataatcaatgaaggagaaatatgaataagatagaattactggctccagcaggaagcatggagagtttaattgctgctataaataatggagcagatgcaatatatcttggtggaaataaattttcagctagagcttatgcatcaaattttgataatgaaacaatgatgaaggctgttgattatgctcatagctataatgtaaaagtatatgtcactataaatacaattttaaaacaaagtgaattaaaggaagctttaaaatatgcaggatacctttatgaaattggagtagatgcaataataatacaagatttagggttagtaaaattaataagagatgtgtatcctgattttgaacttcatgcatctacacaaatgacaattcataatgcagagggagccttatactttagagaaaaaggaatgcagagaatagttttatctagagaacttacagtagatgaaattaagtatatttcaaaagatttgggaattgagacagaaatatttgtacatggtgctttgtgtgtatgttattcgggacagtgcttaatgagttctatgattggcggaagaagcggaaatagaggaaggtgtgcacaaccttgtagaatgcagtataccttgaagggtgaaaattttggagaaagaaaggcttatcttttaagtcctaaagatacatgttttattgatgatatggacgccgttataaagagtggaacttcgtcattaaaagttgaaggaagaatgaaaaagccagaatatgttgctggagttacaaggaattatagaaaagctattgataaggtgttagtaaatacaaagtttgatttacaaaggggaagacaagaattagcacaactatttaatcgagaaggttttgctaaagcatatctatataaaaatgtaggaaaagatatgatgagctataattaccctaaaaatactggtgtatatataggtcaggtgtctaacagtggagaagttaaactagaagcaagcgtatctttgggtgatggtataaggtttaatgacgatggatttactttaagtaagattttaaataataataatgaagttaaagaagcttttaagggcgaaacagttaagttatttccaactggtggatataaaaaaggctataagctatataagatgtctgacaaaaaactttatgatgaattaaatgatgatttaaaaccttataaaaggaagataaatttaactggtgagattgaatttaaagttaattcacctctttgtattaaagcaaaatacaataaaaaagagtatagagtttatggagaaatggttgaagaggcaacgaataaaccattaacaagagaaagagttgaggaagccttaagaaaatcaggagaaattccatatagatttgataagataatttttgatatttttgatgacggatttataagaatttcatctataaataatctaagaagagaattatttgaaaagattttaaaagaagaagtaagttcatatagaaggaaaagaacagaaggaattattaaagaatggaatgcaaaatctcaggaaaacttaggctacatttatagttgtattacaaaagatcaactaaaggcactacttgaggataataaggctcaaaatatagcgttagatatatttttcagcaggcaaaaacatgcgttgaataaaaatgacttaaagaatttatatgaaacttcaaaagataaaaatatatatttaaaagttccaaatatcattaagcaggagtttaatagcatagtaaaaataatagatgaactaaaaccttatataaagggaataattacatctaatgctggaataataaaaatctataaagataagctatttataataggagattataaattaaatatatttaataaagaagcggctgaattttatgcgcaagacgttgatattccattcttaagtcttgaactaaatcgaaaagaaataaaagaattaatgaagaacactaactgcaacatgggaataaatatttatggaaaaactgagcttatgattagtgaatattgtcctatgggaagtacttttggtaataagtcatctaaaaaagaatgtagtggcgtgtgtatgaaggacaattttaagttaatagatagaatgaatgaaagttttactgttttgggtgataatagctgtagaagttatattttaaattcaataactaccaatttaattgatgaaatggaagaacttaagtcttttaatatttcaaattttagagtagactttaaagatgaaagttatgatgaagtaaaagatgttttaaatcagattgctcgtaaagcaaaaaatgaaaataataaatatactaaaggccactataaacgtggagtagaataataccaagaaatagttgacggcttgtaattgatgattaagatgcaaattactttgaaacttgttagagagagtattttaagttttataagtatgaattcttagttatctcttatatgctgtcaattgttgattgattgttaggatgtgggatatatgaatgaaagatctctaagaattttagagtttaataagataaaagaaaaaattaagaaatatgcaagaacaaatgctgctaaagcaaaagttgaggatcttgagccttatgataatttatatgaaataaataataagttagaggagacaaacgaggctcttgaaatcttaatatcaaaggggaatccgccacttgaaggattagctgatatacatgaaggtatagaaagagctaaaaagggaggaactttatcaccaggacaattattaaaagtgggtggaatgcttaaagctacgagaaatatgaaggaattctttaaaagagaagaagttgaaaagtcatatccaaaacttgaagacttagcttatatattagctccagtaaaagcattagaagacgaaatagaaagagccatagtatcagaggatgaaattagtgataaagctagccaaactctctgtaatatcagacgaagcttaaaagaaaagaactcttcagttagagaaaaaataagttctattgttagaagtaactcaaaatacttacaggatgatttatatactatgagaggcgatagatatgtgcttcctgtaaaatcagaatataaaagtcaagttccaggacttgtacacgatcaaagctcaaccggagcaacgttttttatcgaacctatgagcttagtcaatttaaacaatgaaataagagaattgtttttaaaagaaaaggctgaaatagaaagaatactttctgatctttctctgaaagttaaaattaatggggactcatgtttgagtaatttaaaggtccttgttgagtttgactttatatttgcaaagggaagatatgcatctgcattaaatgctataaagccgatagttagagaagatggagcatttagtatattctctggaaggcatccattaatagaaaatgataaagttgtgccatcagatatatatctaggagaagaatttcaaacattaatgataacagggccgaatactggaggtaagactgttacaataaaaactgttggcttacttcatattatgggattaagcggattattaattcctgctagagataactcatctatagccttctttaaagaaatatttgcagatataggtgatgaacaaagtattgagcaaagcttatctactttctcatctcatatgactaatatagttaatatcatgaagcatgtagatgacaagtcattagctttatttgatgagcttggcgcaggtacagatccagcagaaggagcagctcttgcagtatcaatattagaaactttaagaaatagaggcgcaaagctaattgcaactactcactatagtgaacttaaagcttatgcattaaaaacagatggtgtagaaaatgcttctgttgaatttgatatagaaaccttgaggccaacttatagattattaattggggttccaggtaaatcaaatgcctttgagatttctaagagattaggacttgtagaaggtgtcattaaacgcgcaaaagaatacatgtctgaagaaaatcttcaatttgaaaatctaatcagagaacttcaagaaaaaagtataatagctaaaaaagaagcaagggaagctaagatgcttagagatcaagcagaagatcttaaaaagaagtatgaggaaaagcttgaaaaattagaaaatactagggaaaaagcttatatggatgctagacgtgaggctaaagagataattgcaaatgctaaagatgaagctgatgatattttaaaagctatgagagagcttgaaaagcttggaatagcaggtggcggaaggcaaagacttgaagaagagaggaagaaacttaaagatagtttagaagaaagagaaaaaggaattcacaagatgaaggaaaatgagggggaatctataactaatgtaactcttggaatggaagcttacctgccttcattaaatcaaaaagtaattattgtttctatgccagataacagaggcgaagttcaagttgaagctggaataatgaaagtaaatgttaagcttaaagatttaagaaaaactcaagttaccaaagaagaaaaagtaagaagaaaaagagaagtaaagcttaatctaagtaatgtagaatctagagtagacttaaggggattagatgcagaagaagcgtgctacaaagcagataaatatttagatgatgcatatatggctaatttaggggaagtaacaatagttcatggtaaaggaactggagtacttcgtaaagcaataaatgatatgcttaagagacatccacatgtaaaatcatataggctaggtgcatatggtgaaggtggagacggagttactatggtagaacttaaggggtagttatttttttcatatacctaatatttttacttatttaagttaaaaatatcattaaaattattgttagtaagaatattatacaaatattaatgtataattaagtaaagctataattaaatttctcttaagtttttgttttatagtgttaagtgtacgttagataagaggtgataatatgtacataataagtgcatgcttgtgtggagttaattgtaaatatagtggtaaaaataatctaaatgatagatgtttaaaattatttagagaaggaaaagcagttctagtttgtccagagcaattaggcggattaccaactccaagaaaccctgttgaactaaatagtgcagcaagtgaagtgttagatgggaatggaaaagcattaagtaataaaggtgaggatgttactaagcaatttatagatggtgcatatgaaacattaaaaattgcaaaagaacttggaaccacaaaagctatattaaaagaaggaagtccttcatgtggatctaactttgtgtatgatggtacttttacaggtaataaagtaaaaggcaagggaattacagcccttttattggagaatgaaggtataacagtgttttcagatgaagacttagaagtaaacaatagtaagttagtatatcttaatgaatttgatagagaaaaagctaaaaaaagaagactttttgagcaagcagaagaagaagagtcttatggagaagaatattttgatctaacagaaaatttaactgatatgtctgagctccctccaagtgttgaagaaaatgtgaaaaagcttatgatttccttagctcgtgatttaatgggctttgaagaaattgatgaaattgcagaagctacagggctgagtgtagaagaagtagaagaaattttagaggaagaataataagaagcaaatagatattaattaatatatgttgattttgttaattcagatattactagtatttgtttaatccccatgatagattaaattatcatggggatttttagtgtgtggaagtgttttgtatggctaataaggattataattaagaatcatgtttaaaaagtattttaatgtcagttaaaagaaaagttaagctgttacataaagaatttctttgtgatgtaacagcttttttagatcttttagatggagtataaaaactaagaaatatttttaatttaccttacatcagtgttattacaagaatatttaaattcaggttgagtttgaagataaaatccgtttcttacctgtgatatccaattttgaaatatttctagccacgcattgcttgtaaagaaatcttcaagtggccttgtaggatcccactccaaaattagaaatggacctataccaaatgaccaaatcccactttgttctactccagcttctcttataagaagaataggaagaccgtattgataagccatagctggttcaatttgagcaaaaggactaccctcaagagcaaactgattttgaggttgaccaagattattttgaattatatatacctgtcgttgattaagattaagtgaaataaatccataactagatagcatcattcttctgatatttgttaatggagtttcgggatattgttcggttactggtagggtacgtggaaataataaagcctctcttattttagatattatagcatcaacaaattcttgttgaatagaattcaatctacttggatggcttaggaatacaggaactctaaataaaagatttgatgattcctgcattaattcagttggttttacgccagtatattgatttatagcgtctccttcatatattttagtcatttgttttcctccataatattattttatcttaagatatatattcttgaactattaccatgaattattatatgtaaacaaaagtgttaacgttacgataatgttttaattttagataaaaaaactttatgttgaaaaattcaagtattgtagctgctatccttgaagattagaaaattatattctcataataattaagctttgtattgaattattaatatttaaaaggatcaagtaattcaatacaaagcttttactttttaagattatatgcgatttacatattatgtaattaatacatttatgtgtattgtacatgtatttttagaatacacattaaataatatgtattatttatctataaagcatctgttttcaatatacattatttgtattttataattggcataatatttgctttatatataattgagataaaataattattagggggaatttttatatgaaaaatttacgaaaattagttactttagcagtatctttgactatgtgtctctcattctcttcagcagcattagccattactgcaaattctgaacaaaaagcagtggaccttcagttaacgactgtatgtgaaaatagtaaaacaaagtttgtttataattatgcagagaagcttggctcatttgatggacgaggaattacatttggatgtataggatttactacaggaacttacgatggaaatatattaatacattattatactaagctaaatcccaataataatttggcaaagtatattccagcattagatagaatagacaaggaagaacatgatgaggatggaaaaaatgatgatattaaaggcctagataattttataaaagatgtaaaggcatgtaatgattcattatttaagaaagctcaattatatgaacttgatgaaatgtattggaaaccagcagtatctctagcaacttccattggcgctaaacatcaactaactttagcatttatatatgatatgtgtgtaaatcatggagaagatggagcaaaagaatatattaattcggctaagaaaaagttaggtggattacctaaggatggtatagatgaaaataaatttctttctagtgtaatggattatagatatgcattccttaaagatgatgatccagaaggttcggatagagttaatgcatacagaaaattattaaaagcaggtaatgtagatttgaaaccagactttaattttacagtttatggagatactttcaatatagatggtgatgtttattagtattaattaatggtttaagaacaggtttttcttatactaatttgtgatagctactaaaattaatgtaaacaggatagtaattagatttttagctatgcaataaaattatataaataaagataaaaaacagtattaatatggacaagtattaatattgttttttagtttatacagatttttgcacttttaaatattaattttgtatgcatatatgttgtgataacaaatttatattcaaagcgttagtaggctacgtaatcaattaatggcataatactggcgtttaattatatatggcagtattttaagccttttagttatgaaaaacgaaatgtagaaaagatataatacacatacgtgtattatatctttagaaaactgtaaaatgtgtattgattttatactgaatcaattaagtctgagttttatcagtattttagagtattggcatggtaattgcttatataattctatgtaaaaataaattcattctgtgagttgctagaagaaataatttaatacttcatagaaattttactatttagcgattatataattttagtttaatcctacttaagcataaatttaataaacaaacttagttatttaccataaacctcaaatctcttgtattttataaaaaataaacgtaatcttttgcctatatattgagtgaaaatttatattgtgatagtaataataaacaataattcaattatatttgtcttatacatttataaatattaaaattatactgtaacatataaaaacgattactttagtatgctgaaataattatgtgatttaattattttcatttttgagtattaataatattatgcaaaagttatggatttcatctttcataatacattgtttgaatataatgtttattaaaattagttttatataacttatcgtaagatagaaaatttttatgtttgttttcttcagttctattatttaatactttagcagagatattcaatacttagcaagcttgcgattactacttaaatagaattgaaagatgtttatgcagcttaacagaacgaaaaaattatggaggagaagaaattatggaaagatttatggatttttttcaagaaaagatgataccaccattagttaaagtcggtaatcaaaggcatctaatggcaattcgtaatggattagctattacaattccattcattattgtaggaagtatatttcttattttaggtaaccttccatttgattggtgggcagattatattggagagcttggcccaaagatgaatgtagttgtaaattcatcatttggagttctaggcgttttagcagcccttggaataggatatcacttagctaaaagctataaattagatccaattacaggatcagtaatatcttttgtagcatttttacttacacaagtgacagaggattttcaattagatactagtaaatttggagcagaaggacttttcactgctataatagtttgtatgtttgcagtagaagtattaagatttttcgtaaagagaaatattgttattaaattaccagagggagttccgccagcagttggaaattcatttattgcgttaataccagctcttgtagttatgattacagtttggctaataagagtagttataggatttaatataactgattttattactatgatatttagtccagttgtttttgcccttaatactcttccgggaatattaatatatagcgcattagttacattactttggtcagcaggtattcatggagacatgacgcttgaaggtatagcagatccaatatatattcaatttttaactgttaatacagcagcttttatagcacatgaaaagattccatacattacagcatcaggattttactcattgtttgttaatgtaggaggaacaggtgcaactctttgtttagttttattaatgatccgttcaaagagcaaactttataaatcacttggaaaggtttcatttccatctgcatgttttgaaataaacgagccagtcatatttggttttccagtagttttaaatccagttattctagttccatttacagtggtacctttagtacttactactttgtcttattttatgatgtattttgacataattggtagaccagtagctatggttccgtggacaatgccccctattataggaccatttattgcaactggtggagattggagagcagcagtttggtctgctgtagaaatggttatagcagcaataatttactacccattctttaaatttgctgaaaaacaacaattagaaattgaagggaaagaagaaaatttaaatacagtacaagcttagtgtattaattagaaaaatatttatagaatgaaatttaggaggaatttagcatgaagatattattaatgtgtgcagcaggtatgtcaacaagtttgctagtaacaaaaatgcaaaaatatgcagaggaaataggtcacaaggacttagttattaatgctgaaccagtagaagatttggatgaaaatgttgatgattatgatgtatttttacttgggcctcaagttaaatataaagaaaaatgggttaaagaaatagttgatgaaaaaggtaagccttatgcctgcataccagtacaactttatggaagaatagatggaaaaagtgttctagaacttgcactaaacttaatggataaataatggaggatttaaaatgaatatggaattagaagaaatagttttcactataattagtcacgcaggtaattcacgatcagcttgttttgaggctttaaatttagctagaaatggtgagtttgataaagccaatctatgtatgaaacaagctaaagaagaactttcattagttcacaatatacagactggcttaattcaagaagaggccgcaggtaataaacaagaattatctttattactgatgcatgcagaagatcatttaatgactgcatctttagctaaagatcttatctgtgaacttattaaaatgtatgaagaaaagtttaaagaaaaagaaatagcatgcaatgtataataagtaaaaacagcaaatagtaaaaatggagtgggttatttaataaaacttgaataatccactctttgatatgtttattcaaattctatggtaaatcatgtataataagcttattagttaaagatatttaaatttaatttacgtacctagagtgttaacgttaagagagttatacgaataggatatgaggggaaaagcaatgagaaggattgataatatttataaagttctaagggatctgtgtagtaaggaatataatgaacgtagatgcatcaacggtttttcagctacagaaatttcattaataatgaatattcaaaggacaaacgtatctagtgatttaaataaactttatagagatggaaaaatagaaaagatattgaagaagccggtactatataaaataaaggaggaggatattcagatagggcaaggcacagaaaaagttttaaaagatgcttttgataacatcattggaactagcttcagtctgaaaaacgcatcacaacaggccagagctgctataatatatcctcccaatggacttcatactcttcttttaggggaaactggtacaggaaaatcaatgtttgcagaagttatgtataagtatgctaaagaaattggcaaaataaaagccaatgcgccatttatttcatttaactgtgcagattatgcaaataatccacagctactagtgagtcacatctttggtgttaagaaaggggcatatactggtgctagcagagataccataggattagttgaaaaagctaatgaaggaatattatttttggatgaggttcatagattaccatcggaaggtcaagaaatgctattttctataattgataagggcatatataggagacttggagattctgaggaagagtataaagttaaactacttataatatgtgctactactgaaaatgttgaatcggcattattgaaaacatttactagaaggattcctatgattatacggttaccagcattaaaagataggactatagaagaaagatacgaacttattaaaaactttttaaagatagaagtgagttgcattaagcagagcataagtattacagcaaatgcgctaaaagcatttttactatacaattgttctaataatattgggcaactcaaaagcgatataaaactaagctgctcaaaagcttttcttgagaatatgatgaaaagagataagaatatatgcattcatagtcaatacttgcctcagtatgtacttagcggattatttaagtataaagagaaaagaagtgaaattgataggtttgtaaatcaagatgttataaagttttgtttggatgaaaataatgtaagagaagaagaagatataaaaatagttgatttttatggagcattagaagaaaaaagaaaacttttggagtctaatggaataagtgaaaaggacataaaacttataatgagtcttgatatagatacgtattttaaaaaatatatactgaatatagataaggatagtttagaagaattatataaagtagttgatagaaaaattgtagatctagttagtgaatttttaaataaggctagtgaaaaattgttaatgcagtttgatagtaaaattttatatggactatcaatgcatgtagcaagtacagttgaaagaattttaaatggaaaagaaattaaaaatcatcagcttgaagatattaaaaagatgcattccagggaatatgaaatttcgtatgatttgaaagaaaaagttgaaagcacatttcatattagaattccagaagatgaagttggatttataactatgtttttatgtatagataaagaggattatgaaaatgagagtagtgttggaattattgttgctatgcacggagagtatacagcaagttcaatggctgatgtagctaatagacttttgggtgagaaatatgctataggctatgatatgccattggatcagaaaccagagactgcactagagaatttaacagaaatagtaaaagaaatagataaaggtagaggagtattgctgttagtagatatgggatctcttgttttatttggtgatatgatttacgaaaagacaaaggtaccggtaaaaacaatagaaatggtgtctacacctattgttcttgaagctacaagaaaagcaacattaaaagcctcattggaggaaatttatgattgctgcataaatttgaatccacatatagtgcgaagttatgcagataattttagtataaattcaacacttaaaaagaaagtaattataacagcttgcatcacaggacaaggaactgctataaaactcaagccaattgtggaaaagaaactagaaatcactagcaatgacatcgacatacttaatatagacatagtaaacaagaaaaaattcaatcataatatacaaaaaataaaggcagaaaaggatatattggcagtggtaagtgcggtaaaaccagatgatgagtctttgttgtatatatcaacatcagatatttttgataagaaaaaagtagaactactaaaatcacgattaagtctaatagaagagatatatgatatgagagaagtaattggagaaaatgtaaatatagattcatataagtatatcgagtgttttaggagcttttacatacgtcttgtaaataataaagttgaacttaatagttctgcattaatagggttaatattacacattgcatgtgtaatagagcgtatgttgagtggcgaaaaaattatatatcgtaagtatagtgagaaaatgttagatgagaataaagataaatataattttgttagagaaatattaaaaccaatggaagaagcatttaatatagaaatatctgtaaaagagtacttaattattcttgagactatatatttcttgtaagttataaaaaaggaaagtacaggtcatgtaaaaatatttaaatataaagttaagatatagttctaatgtagaaaaatatagtataatataaaaaagttttttatttatatactcttgtttcatttctcaaaaataatatataagggtgataaatatgttgttagactatataatgggatatttggaagagcaaacatgctactttggaagagctggtgataattctaggtttacagctagcgaaattgcaaagaagtttgatgttaagagaaatactgtaagccattatttaaatcaaatggttgacgaaggtaagataataaaaattaatacaagacctgtttattttttgcattatagtcaatttgaaaagtgtttttttggaataaaaggcaacaaatataatagcattgaagaattattttttcaaaaaccattagatgaagaaaaggacaagttttcagagctaattggatttaaaggaagtctagaaaaagcgttagaacaaataaaaacatctatattttatcctaataacggattaccgattatacttagtgggccaactggagttggtaaaagtcttttagcaaagtatatatataattattcggtagaaaaacaagtaatatcaaaagattccccatttattgtatttaattgtgctcaatattataataaccctgaattattatcggcaaatctttttggatatataaaaggtgccttcactggggcagaaagcgtaaaagaagggatgcttaaggaagctgatggaggaatactctttttagatgaagtgcatagactaaacgaggaaggacaagagaagttattcacatttatggatcaaggggtttttagaagaatgggtgaaagctcaggatggcataaagcaaacgttagactagtttttgctacaacagaatcactatcagaaaattttttgagaacttttttaagaagaattcctatatcagtctcaataccagatctagataagcgtggcaccgatgaaaaacttcaatttatatatcaatttttaataaaagaagcgaaaatattaaataaaaagatttcaatttcaaatagggctatagatctaatgttgaattatagctttaaagggaatataggtgaactgcaaaacacagttaaatatgtatgtgctaaatcttatactaaaaaaataaattcagaaatgatacagttaggggtattggattttccagaagagttgttggaagactcaattaagaaatctgatataaagataaaacaaagtgaatatatattaattttaccagatactactgtaccaatgatattaaaaaaagatgggaattggcagcaactaataaagaatacttatattcaaataatgagtttttttaatgatattcaaaagaaaaatgtaagcattgagtattttgagactaatgtttttcaagaagtatatgctttgtttgataaattaatatttgaaagaaaagaagaaaataaaaatgttatgattcaatacataacagcgagtattcaagagatatttagatacatggagataaattataatataaaatttaatggtaatagcgtttatgcaatatcatattttttatatataaagagtgaagattcattagaatggaatgaggaacaaagaaaattaagagatagtttgtataactatattttaaaaaacaataagctagaacatgagattgcaattaaattaattaagcttattgagagcaagatggatattaagtttacgatagatgataagatttttttatctttttatttgaaaagcttaaacattcagcaatctaataacggaactaaaactgtaattttggctcatggttatgcaacagctagtagtattgcaaatgtagcaaatagaatgttagaaatgaatatgtttgaagcttttgatatgcctattgatataaaaatggatgaaatagcaaaaaagttaataaattttattgaagaaaatgatgtatctaaaggattggtaatacttgttgatatgggttcgctaaatgatatatataaaagcataaatagttatataaatggtccagtagtaattattaataatgtgtctactcaaatggcgctatttgttggtgaaatgttaaaaaataaaatctatcttgaagaacttgtggaaaatctaaaagaacataatgaaacaagttataaaattctataccctgaagaaaataagaaaaaggtaatcgtaacttcttgttttactgggatgggaactgcgttacaacttcagaagttattgcaggacagtatcccagaaaaacttaagattaaggtcatagcacatgactatgagaggctaaaaacttttggaatgaatgaagcattattccaattgtatgatgttttaactatagtaggtactgcagatccggaaattaaacatattaattatatttccttagaagatttaatgtctggaagaggggaaaatcaattaagacgtatactccaaaaaatagctgatgaaaatgacttgaaaactattaatgataatatagttcacaattttacattaagaagggtaatagatacattaactatattagacacagataaattgctaagaaatatagaggaatgcttagataacttagaaatagctatgaaaaagaaattaaataatgagaaaaaaattgctttattagttcacataagttgtttagtagaaagactgataaggcacgaagaaatagatgcatatccaaacttagaaaactttatagagtgtcaaaaagatatgataaaaactatagaaaattcatttagtgtcattgaaaaaatatataatgtcaaaattaatctaccagagataggatttatttatgatattttgatgtatcaaagtactgaaaatactgagttttaagtgatagagatagtgaagaataaagaagcgtgccagacattggcacgcttcttgcttttataatgctatgagaagtgaaataagatttataatatcatgagtttggatggagatgataaattttgaagagaagatttttattagcaagtcacggaagacttgcagatggaatgcatgaatctgtaaagataataataggaaaacaagataatatatcaacactttgtgcatacataagcagcgaaaaaaatttaagccaacaagtaaaggaggtcataaataatttagaagatggggaagagttaatagtaataacggatatcttcggaggaagtgtaaataatgagtttatgaaatacattaattatgaaaacttacacattatttcgagtatgtgtttaccacttgtaattgaattaataacaagccaagaagagagtacagaaaaattaatcgaagaaacaattaaaaatacgcaagagaatataagatattgtaataaaacatttcatacggctaaatcaattagagacgaagaattttaaaggagtgattttatatgattaaactattaagagtagactatcgtttgttacatggacaagtggcattagcatggactcaacaaattaacacagattgtatattaattgcaaatgataaacttatgcaagatgagataaagaagacaacaataaagttggctaaacctaatggggttaaattagtaattaagaatatagaggattccattgcggctataaaaagtggagttacagataaatataagttattcattatagtagaaacaatagaagatgcagcaaaattaagcaatgaattgcctgatataaaatcaattaatataggaggtgttatgcctagagaagggacaagaacaatcactaaatcagttccaatatcaaaggaggaggaaagaatattacaagaactaataaatagagatattgaattagagataagacaggttccaggtgataagaaaattttagttaaaaacgtattataaggaggtaaaattgtatgactcaagctattttagtaggattgattgcaatgtttgttacgtttgaatggtgtttaggatcatgcttaataacaaggccaatagtaacaggagtacttgtaggattagttatgggcgatttacaaacaggtattataatgggagcaactcttgaaatggcatttattggagcagttacattaggtgcagcagttccaccagatgttataacaggagggatcttaggtacagcttttgcgatagcaacagggcaaggagcagaagttgcattgacattggcatttccaatagcaacgctatttctattagttgataatgttatgacactttttgtaatgccattttttcttcataaagcagataaatatgtagaagagggaaatttcaacggtgtaagtaggatgcactttttagggggatttgtagtaaagagcttaccaagaggaatttttgttgcactagcattatatttaggaagcccatttatgagcgccgttctagatagcattccacaatttgtacaaaatgggctagtagttgcagcaggatttattccagctttaggaatatcacttctagcacaaatgattttgacaaaaaaattggttatattctttgtattaggatttgcaattagtgcatatttaaaaatacctatgctaggtgttgcaatttttgcaactatcattgcgatagttcttgtgggattacaaaacaataatgtaaagaaacaggaggtaatgctagatgaagatttctaataatttagaacaatcaaatgatgttaaagttactaaaaatgatcttaagaagatgtttttgagaggccttgctttagaatattcatggaattatgaacgccaacaaaatatggggtattgctatgctatgctgccgattattaagaaactttataagaaaaaagaagagcaaatagaggccgtaaaaaggcatatggaattcttcaatacaacaccatatgtatcaactttagtattagggatatctacagcaatggaggagagtaacgcaaataatgaagattttgatacatcttcaataagcagcgtaaaggcatctctaatgagtcccttagcaggaataggagattcgcttttttggggaacattaagggtaatagctacaggagttggaacatcattatcattacaaggaaatattttaggaccaatattgtttttactattatttaatataccacaatttattgttagatatgtctgtatgataagtggatataaatttggaacgaagtttcttgaaaaaatagaagactctggattaatgcctaagttaacatatggggcttcaataattggattaattataataggagcaatgatacctggaatggtgaacattaaaattgctggaatgatgggaactggagatagtgctgttgaaatacagaagataatagatggaataatgccatatattcttcctcttgggcttactactataatttactcattattgcagaggaaattaaaagttatatatatactaataggattaatggcattaggcatattaggcacatttttaggaatatttgcagcttaatattagagatgcaattatataaatatttattacgtagatatcaatatataaaaattaggaggatattatgattaaatttgatgaaaaaaagatgctagaaaatggagaatatatctatagtaaaagggaggctattgaagaaatagcagacaagctaacagaaaaaggatttgaaaatatattatttacatcatctggtggatctatagcaatgatgcaaccatttgaatatatgattaaaacaaaatctaagattcctgtatactcagaaatatcagcagaattattattaacaggaaattctcaaataactgataaatcaatagcttttttagcatccaagtcaggggatacaaaagagactgttgaagcagcaaagtatttaaaggaaaagggagttactactatttctataattgggaaagagaattctatcctagaagaactatcaacatattcagtagtatacaaggatggtagaccacaagaattaattctatatatattaattggtaagttattaaataacaatcacgaatttacggattataataagtttgcagaagagctacaaagcttaccagctgcattgaaccatgttagaaaagcaagcgatgaaaaagcaagagaatatgcagaaaaatataaaaatgatccatatcaaatttggattgggtctggaaacctttggggaactacttattcatactcaatgtgtgtattagaagaatcccaatggttgagaactaaatctgtaagttcaccagaattttttcatggaactatagaactaattgaaaaagatgtgtgtgcaactttattaaaaacagaggcagaaactagaccattagatgacagagtagaaaagttcttagttgattatactgataaatttacagtatttgatacaaaggattatgaactaccaggaataagtgaagaatataggaaattattatctccagtagtaatgtgggcaatactaggaaggataagtgcgcacctagaagtaatacgtaatcactcattagaaataagacgttactacagaaaggttgaatattaaaaataataataatggttatcctaaaattaacttttaggataacctctttttgaaagtgaggaaataatattatgaaagttattggactgggagacaacgtaatagatagatatatgaataagaacatgatgtatccaggaggaaatgcaataaattttgcagtaaatgcgaaaaaatgtgaagttgattctgcgtatctaggagtatttggggatgatgaggaagcagagttaataaaatattccttagaagatttaggggttgatatatcaaaatgtagaaagttggaaaatggaaccacaaaaaggtgtgatataaatataatcgatggggagagagatctattaaatgttgatataggagcaaattggcctaagcctataagaattgaaaaggatgagttagagtatttagctgaatttgatctcatacatagtagttgtaatgcaaagttagaagatcaagtatataagttaaaagcgatagattcaataataacttttgatttttctaccaaagataagtatagaacagatgactatttgcagaagacatgtccatatatagatttagctttattttcatgtgagaatatgaatataaatgagataaaaatatttcaaaagaagattcatgattttggatgtaagtatgtcttagtaactatgggaaaaaatggacaagtattttttgatggcgataaatactataatggaaaggtaaagttagttaatccagtggatacaatgggagcaggagattcgttcatcgcggcatttattgtcactttgttaagatttgggtggaaagataataataaattaactgaaaatgaaatacttagtgcatttgaaaaggcaagtaattattcggcagatatttgcatgattgaaggtgcatatggatatggaaagcctataaaggaaaagagataattataaaataaaaaaatatatttatatgaaaattataagaactattattatgaagtgaacccaattaagtagagaaagctgaaaatgctagaagaggatttacttaaaagggttcactttatctgcattcttattaagcgaaactcaaggtatataataaaagggagttcacaatatattattaaagctaaataaatatgaatgaattattgtagccagtttttagctatgggataattaattggtattttaccttcatttccaaatcctaatgtatgagctgaagtatgaaaatcactgcctccgctttttaacaggtcatggctgtcacaataattaattatttcatttatttgtgagtgagaatgcttacgatgtatgcattcaataccatctattaagtttaatttgacaatactgtcgatataattatatatgttatctacgtcatatacataaggatgagctaaaaaacatttaccgcctgaactatgaatggtttctgcagcttcatagatatttggaagatcttctgttggctttatataaaattgactattagggtttaaatagtgttttctataaaaagtagttctatcagtaatttctaatttttttagaatatgcaaattttcatcatagcttaaaatatcatcgcaaataacatcgttagcaggagtatttctgccatttatatttaaattagaggaatgtagaatttttagttcattacaaacatttattaaataatttaatttagaattttctttttcaataacattaatatttttattaacttgtaatattcttgatttttctatagaatcaatatcaatattatatcctagcatatccatgctgattccgccaaatgaaaaagcgatttcaattccattaattatgttaccaccgtataaatcctttatatttaagttgctaatttttttatatgcatcaacagattgatggtctgtaaatgaaataaattctaaattcttttcttccgacatttttaagatgtctattacatcaaaatctccatcagaattatttgtatgaatgtgtaagtctatcattaggcatttctccttcattttaaatcataaagaattataaacaattttagagttatttattttaaggaaactaggtaagtaattttaaagttatcatatcattaaatatttttttagacaaatagttaatgtgcattgtcattttttgaattagttatagtacagatagttgttttatttataaaacttagtatgatatttgtaatatattaaatatattaaatatataaaaataaagggtgagttttgataaaggaaaaataaaggtgcgcaaaaaataaaatatgttaaatatgattgagttttactaacaatgtgataaaattatataaataatttgctgagatgagataaaaattttagagggaaatgtttcttagtatactagtttaaaataaatttttatatgtacgggagggaatttatgattactaaagttttagaatttattagctctgaagctgtatttgagagctttaaggaattagaaaagtatggaggaattgagactgaatatatagctagcacttttaagatgagcagaactcaagcaagtagattactaaatgaattggtgaaatctaacgatttaattaagataaataatcgtccagttaaatttcttcctagaaaaaaaattaatgatattattgggccaacaaagaagagtatatataaagatatatacgagctagaacaggaatgtaagtcattaaaacaggagattatttttgaaaatataattggctatgataacagtctgaaggaagtcattgagcaaatcaaaacggcagttttatatcccaaagggggattaactgttatgcttacaggtgaaagtggagttggtaaaagctttttagcagagataatctacaagtacagtgtaagctgtaatgttttagaaaaagatggaccatataatgttttgaattgtgctcagtattataataatcctgaattattatctggtatattatttgggcatgctaaaggggcatatacgggggctacagaatcaaaagcagggttaattgaacaatcagatggcggaatcttatttctagatgaagtacatagacttaatagcgaaggacaagaaaaattgttcacatttatggatacaggagtattttcaagaattggtgagaatggcgtaaagagaaaagcagatgtacgattagtttttgcaacaacagaaaatctatctgaatttttgccaacttttttaagaagaatacctattaatatatatatccctaatgtagaggaaaggggacctatcgagaaaaggagaataatagaacattttatatatgaagaaagtaagatttttggaataccaattgaaattacacagcttacactaaatacaattctaaaaataaagtttaaaggaaatattggagaatgtaagaatgtaataaaatatgcgtgtggaagagcatattcaaagggccaaagaagaaatgggaatatatttgtaacattgcaggatataccaagaaatatatacattgagaatgcagaaatttttaagtttcaaaacaataataaaagcaaaagtattgtattttcagacaatagcaatatacatgttcaaacatatgaagagagtaagcaaagcataattaagcaaagtatattagagtgttttaagttgtataaattagttgaaaatggagaagtcagcaaagaaggattttatgagaagagttccaatataatggtaaatttgatggataggctagtatttgctaataatgatgaaactaaaaacgtaattatagaatttataatatcaacaatgcaagatatatttagaaatctagaaataaattataatattaaatacgatgggaataatgtgttggctttttcatcatacctatactcaaaaaatgatttttatagcttaaatgaagaggcgttaaaaatagagaataatttattgagctatttaaagagagaaaactataaagaatactctatagtgtataagatagcaagttttatagcaaataggttggatatttatttaactgatagtgatttaattattatgattatattcattaaaactaccgcaatacgtataaattttaataaaatgaatgcaataattgttgctcatggatatgcaactgcaagtagtatggctaatgtctgcaatcgtattataggtgtaaatgtatttgcatctattgatatgccaatagatgcaacagcaatagatgtacttaagcaattgaacaggtatattgaagatgataaattaaaaaatggcttaattgttttatttgatatgggctctcttagcttaatttatgaaaatttaaaagataagattaatattccaatgctttgtatagatcaagttacaactgtgttagctttagaagtaggaaatttattaatacaaggaaaaactattgaagaaatctctgaagtaatgaatgaagaaattaaacctaacatacagttattttatcctcaaaagaataaagaatatgcaataatagcatcttgttttacaggaataagtactgcaattaagatacagaatttactttcagaaagtttagcaggaatagttgatgtaaaggtggttccgtatagttataataatctagtgtctaaaggaaaagatgactctatattcaagatgtatgacgtattagctattgttggtacgtataatcctgaaattgagacaattaagtttatatctttagaagatattatatcaggaaaaagagaagatgaggtgtacagaattttcagtaaggtagcaggacatgaccaaattaaattaataaatgattctattgtgaaaaacttctctttgacaagagttatagatagcctgactattttagattctaataagattatagagagaatagaggacggtattaatgagtttgaaaataatcagaaaagaaaaataccaaatgacaaaaaaattgctttatatgttcatttaagttgtatggtagagagactagtaagacaggctgagatagaagaatatacagatttaaatttgttaattgaagagcatcagagtgagattaagctaattaaaaattcatttagtgtgatagaaaaaagttatagtgtgcaaataccaattgcagagattggatatatctataatataatatatggaccaattcaatgatttcaagcgattaagagaatacaataaagttttataaaaagcatgtcactagttggcatgctttttgcttattaataaggtataaataaaaaaacaaaggaggtgatggtaatgaagaaatttctaattgcaactcatggagaactatcaaaagaatttatagaaactagtaaattaatagtaggatcattaagcaatgttgaatatttctgcatgactaaagataaatcgggagatgatgcagaaaaggaaatgaaaagaattttatctaataaaagcgaagaagaaaattatattgttttaacagacatttttggtggaagtgtagctaatttatgtaccaatttattgctaaatggatatgaatttgaattaataacaggtataaatttgccaatgattttaacaatactattatcagatgaagaggatatagaaacattggtaaagaacggaatagaagaatcaaaaaaaggaattattcatgtaaatgaattactaaaaaacaataatgaaaggaatgaagaagatgatatcattgatgagaattgacgacagattaatacatggtcaggttgcatttggatggtcaacatcattaggaataaatgtaatattagtagttaatgacgaagcaaaaaatgatcaaatgaaggccatggcattaaacttagctaaaccaaacaatgtaactttgtatattaggggagtacaggaatcaggtgagatagtagagaaatttgctcaatctaaaaagaataatgtacttgttttagtgaaaaatacaaaagatgcattggaattagtaaaaaattcaggcggagctataaaagagttaaatgtagggggcttgagatatgaagctggaaagcagaagctaacagatttagtagcagttgatgaaaatgatgtatctaatttaaaagaaataaatgatttaggcatagaaattgaatttagaatgctgccaagggataagaaaaagactttatcagatttactaaaataagtaaggaggtaaaaaattatgatagcacaagcaattatgctgggattacttgcaggaataggtatactggatggacgtatttttgggcagataatgcttgaaagaccaataatcacaggtgccttagtaggactaattttaggcgatttaaaaacaggtattattataggagctcaacttgaacttatatggatgggtattgcaggaataggcgcagcaacaccaccagatgttgtaacaggtggtatattaggaacagcttttgcaatattatctggaaatggtgttgaggtagctcttgctatagcagtaccaattgcagttttagcacaatcattaggagtattagtaagaataataaattcttattttgctcaaagggcaagtgtatatgctaaaaaggctgacttcaggggtattgcaataatgatgtggattccggttatgttatttttcctaagcacttttattccaacatttttagcaattatgttaggggcaaatgctgttacagcattgataaattccattccaaagataattttagaagggcttggaatagcaggatcattattaccggctgtaggatttgcactattaatggatatgttactttcaaagaaaatggctgtatttttcttcataggatttttattagcagcctacgctaaattagatataacagcaatagctttatttggagcatgtgttgcatttatattaaatatttatattaacactaaagaaaatagcacagctaagcaggcagttgcaagtaatttaacggaaggggagattgactttgaataagctaggtaaaaaagagttaagaagtgtattttggcgttcattcgctcttcaaggagcatttaactatgaaagaatgcagaatttaggctattgttatgcaatgttaccagttattaaaaaactttattcaaagaaagaagatcaagctaaagctctagaaagacatcttgagatatttaatacaaccccagtaattgttccgacaatactaggaattactgctgcaatggaagaacaaaattcaaataattccgattttgatgaaagcgcgattagtgcaataaagactgctttaatggggcctttagcaggaataggagattcgctcttttgggggacatttagaattatagcagcaggaataggtgtttctctagccagtgaagggaatatatttggaccaatactattcttactattatataatgtaccaggttttgctattagaatattgggattaaaatatgggtaccaattaggagttaactcattagagaagatacaaaagcaaggattaatggaaaaaataatgtctatagcaacaacagttggattatttgttgttggtggaatggtatctactatgttaaaaataaaaactccgttggtatttaatttaaacggtgcaaaagtagtagttcaggatatattagataaaatattgccaaacatgctgccactattatttgccttctttatttactatctattaaagaagaaagtaagcatcactaaaataacaataggtgttatagttggtggaataatattgcatgcaatatggctattataataaaaaataagagaaagaggtaataaaaatgagaatacaagattatatgttagaaactccaactaaaatgaaggagatagtctcaaaatctgatgaattatttaaagaaataataaaggaagatatagataaaattataattacaggatcaggaacaagttatcattcaggggtacaagtacaaacttatttgcaaggaatattagatgctgaagttatagcaatgtatccatttatgataactaaagatacattcaaaggtaaaaacgaaaagacattgataatagggatatcacaaggcggaagtagttattcgacttataatgcaatgaaattggcaaaggaatgtggttgtataactgcatctatggctggatgcgaaaatgctttaatagatgaggctgcagattatattttaacagtatactgtggagaagaaaaagctggagctaaaactaaaggtttttattgcacaaagttaaacttaatgcttcttggacttaaattaggaaaagaaaatggacaaatatctgaagaaaaatacaaagaagaaatagataaaatattagatgctagcgatagatttgaagacgtatataaaaagtcagaacaatggattgagaaaaataaaagtagattagtagaagctaaggaaataagaataataggtccagcagaattatatggtgatactttagaaagtgcattgaagttattagaaactatgagagtgcctgttacaggatatgaatttgaagaatttatacatggtatatataatgcaataaatagtgattcaacaatatttatattagatacaggaaaagaaccaagagtagcaaaaatgattgaagttttatctgaatggacaagcaatatttatgtaataggaagaaatgttgcttcggatgatagaaatctacaaataaatgtgagtgaagatgaacatcatcaaacatttaatttcatagtgccaatgcaattaatatgtggagagatacctaatttaagaggtgttaatccgagtataccaaaagatcctcaatttcatatgaaacttggaagcaagagaattaataaataatctgtaataaaaataattgttaataagttggttgcgtaaaaattctataataattatttaaacgtattgatgaaaaaatgttattaggctaataatttattttgaggtttaattgaaattgaatatattaagttttttgtaaaatttagaacagtaaatagtttttaataaaaataaactatttactgtttcttctatttgaaaagagactacaatacaccattttttatatccattctaattaactagaaagatctatattattctgtgattatataacacttttaattttttaaagactatgcttaataatccaaggaataccttatctcttattgctataagaattataaagtaaatactgcagcaagcaagtatatcaaggatacaggataatatagttccagatataaaattatttataacaaaggttattgggatgaatattaaagagtaacataaatacttaaaattctcaaaagcaaataattttatatttatgttaagttcattttttactaatctatattctaaagccataactactaaatttgaaactaaagttgttgcgattacttttgttggtgtgaacatattggtaaatattaaaagagcattcaagattaaatttaatatccctccaatgaaaactaacttagcgtctgttttttctctcccgaaaatataaattatctgatctgaaataattctatcaattccaatagtcagcatatatactgaaaacaccattagtattggtacggctggaagatatatatcagtacctttgcccataattatgataacttgtttagaaactccaagtaatcctattgaggctggaaataagaacaggaaatatattttaattaccttatttaataaatttaaatagacttcttttgaatgattttctaaatagtttgaaagtctagccatggaaacttgaactattgtaaacattaagatatctatcattgacattatcttttgggcgactccataatatcctgcttctgttgatcctaaattgctatttagcatgtttttatcaagccaagtatataaaatgtatgtgttagcaagtattacaactgaaaacataggttttatatgtttttttatttgtaaatctgagaagtcaaagtgtatcatcttttttatatatataaaactggatatgttattaataaaatttataccgcaagtaagatatatgtaaaataaaaaatcagcctgagtctttacaaaatatattgttaataaattatatattattttaattatcatagtttttaatgctataaaatcataattttcaagagcttcattgatccattcaacattgaacatattaaagactatgtttaatcccataaccatgcaagtataaaaatatgcatcatttctatggaatatagttaaaaagatagcataaaaaatagaagttacagctgttgttgtggtggtaattacaaatagactagtaattgttttggttagtttatccttatcatctcttactttgcttacttctcttaaaccatattgataaactccaaagcttgcgaaaatcataaaaactgcagtccaggtttcccccatggtcatatatccatttaatttatcttgaattgcactaagaactattggcataactattataggtaaaattatatttgaaacatttaatactgctttaaaaaaagcatttttagatattgatctagacataaatatctccttaaaatatattgtattttgaagtttgcaatattatggtaatatagtaagtgaattgtttcaattactatatataaatgtctaagataattgaaaaatataaaatattcagttgaatatgattcaacttacttgattatcataatatgataacaatatggagtgaggaatttgaataaagatttatatgaatttaaagaaataaatgaaaagataaagaagaaattaaattatattaaagctgattcagatattatgtataacaatattaatgaagtaaaagcattaaaaaatgatatatatgaaaagacatctaaggtttttacgtacaatctaagaaaattaattcaactggaatcaacacaaaaaaagttggctggtaaaattggtatatctgaggatttattatctaaatacaaatcaggagatgctttcccatctatagaaacattactatatatttctgaagtatataatataacaattgaaaagcttatttctataccgctaacagcagaagatattgagaacttagaaaataataatgaaattggatcctatatttttgaagagaaatactatgtttatttttttgttactaatatagctaaagaagggtctttgcatgaaggaatcatagaaattaagaatgaaaatgtaaattttaagatttgttcagatgacaaggtaattaaatattttacggggaagtatattgtatccgataaaatgatattttttaatttaagcagctcaaatgatggggttacatatataaatatgattaaaccaaacctaaataaaaataagtatactggtggagttgctatgatgatgcttccctcagatgcgaatagtaaaccatgtgttcaaaagattttatttagcaaaatcaagttgaatagagaattatattacaataacctaaaagagattttaaattttaaaattgatggagttaatttaggtcatgttaagttatctcagtgggaagatgaggcggcatataattttatattgaaagtattattaacatagcttattatactcgtaataagctaatatatttttatacgacaaaaaagggagaaataatgcatagttaaaaaggtattgaattaacacaataccttttaaactatttattttttgtaataaaaatatgataggagatactgatatatatttttgaaagtaaggaaattatattctaatctataggattagaagtaataaattctttggctatttcatctgaattagcagtgttgccaaaaaaacatacagagtagtaaatattattttccttccaaaaatattctccattgctgccagaagtgccatcaggatagttttcatcatataagtatttaaatacgtcattattatttatagttaatttttgaactttgatttgttcagttttattattttcgttattgtatatagtggtatatccactttttttcatatcttcatactcttttgaagcttttttctggttgaaagttattgaaccgttcttatttctatatatgttatcaagttcatagctaatattattgttttttatatctgagttgtctgaaattcctactgctgactgattaatagttatatcttcatttatttttaacggaaatttagggttaaagcctaggtatttttttgcagattccaaatcttctttgtcataaatcatcattgtagcaatttctgttgaaggggaatctttttctacagaatattttacgttctttatttcgtctggatatactatagatttcgctattgtttctatattattttgcgaaatattagatccttgattagcgttttttcctgaacttttcgatggtgaattatatcttatactataccataatccttcatttttccatgcgaaatatttatctacatcttttcgttcaggtattacatcaccattttttaaagtttgagaaggggatatttgagttaaaattacattgaatccgtctatatctcctagcttcatggattcttctttactttcaatataattttttgatccaccttttacagtagctattttcttcaaatattctagtgggtctttttcagaaacttgaaatgtaaacttagtatcaccatctaagtatataagtaaaacattatcttgatcagaaagttttataagttgaaggctgctagctctactaagctgaggagaatcaggtagtttaaatttgaatccagctactttttctactttttctatatcatagtaagatttttcaggtgtatcaacaataaatttagggggagtatttattgctgtactgctctcagtagctaatttattggtgttaatatctaaagcgttaacatttatgctattggtaagcatgatgactgtgattaatacacaacctaatacaccaattattgagattctataagaaccagttttaaatttttttatcatttcaattcgtcctttcatttgattgtttgtttcaaaaaaaattgctaaattagagtggttagttttatttaaaaacatttttgaaagatttattaggctcataccatactttattgcttctttttctcctagtaattcaagaacgcaagcatcacaggcatattctctataaagttttattttattaagaaggaaccaaacaataggattaaaccaatgtattgaaaatataattgtgctcaaaaagttacataataaatcttttcttttataatggaataattcatgcaaaaatatatgtgaaagtagattattatcatttatatttaaaatatgtttaggaagataaatcttaggttttgtaattcctaatatacaaggactattaaggtcatcacatacgtaaaaggaaatattagaacttacattagctttatctttacataattctattactgattgaatttcgggatacatatctgtctctaaatgcttagttttgcgcttaaaaataagcatagataaaaataatatcagatctatgattaatacacctattatccaaatgcatgagattatttttaaaatagaattttgtttattagtgctttgagttttatcttctgtctctatttgagttttttcgttatagatgttattttctatgcttttcttaggaacttctgaatcaaattttgctagttccaagttagtattacccttggatagatttagagtgttttcacatttttgatataaagtattaaggaaattagtattcatgtccggagtaataggcacaagaaaccttataagtaataaaataagcaatatattcttaactcttatgccaatatatttattaaataattttaaaattaaaatgatcaatagtgcagaaatactagctgataaagaaatttgtaaagtaaataaaaaaatcttttctaagatttccacaaaaatatcacctccatgtaatttgaatttttaaatataaagtttaattttataggctttaccatactaaatatgaatattaatatttaaaaaatatacgtgttctgtagcttagtatcttctttaaaatatcttaatcatatttgttacttatctttattagagtttttttcttttttatttttaagaaggttttcgagttcttcgatttcatcattagataaatttttttcttctaaaaatttagtgaaaaggatgcctaatgctccatcatagaccttttttagaaatgtttcattttcagattttatgcattcattttcagaaattaatggatagtaattataaattcttcctgatttttcaaaacctattgcaccttttttgataagtctagttataaaggtttttatagtttgcgttgaccaattcattttatctgataatgaattgattatttgctcagaagttaaaggatttgttttccatataagtttcataacttcccattctgactctgatattttaggaaagattttcattaaaaaactcctttcattttttaatctacaattgtaatcactatttcagtttacaattgtagattaaatatgtcaatataaatatttacatcaaaaccaattaattactttaagtgaaagttggtcaagtactatttgataaaaaatctaaactactatgctataatatattttatgtaaaaatagcattattggaatgcaacgattagatgtaaaagtgatatttaatttataatttatagattaaataaatggctagaattttatttgtgcttgtcatgaaagaggtgattatttgaaactagaagaattaaagtcaatattatttaaatcagcttcatctactatgaaaagagagggagaggttaaatttaataatggtttaatcacttattttaaggggaaaaagatagataacatatatcatatttatggaaaagttacggataaaaataaaattaacgaatttagtacacatattaaaattaatcttcagaagaaaaaactagagagtgctaactgttcttgtaatgagtttaaagaatttacttcaagtggatatacattaatgtgtagtcatataactgctactgaatataaatttattagcttacttgaaaatgataacaatagagaagaaaattctgaaaagaaagctgcagaaaaatataaaatatggggaaataatcatagcacaaggcttattcgtaaaatagaaaaagattctctatattatgaggtacaaacaccttcgagaagtggaaagcttatacttaagccagaggaacttagaaaatttttaaaaggtatagaggatagaaaaataaaatttaagtttgattatattgaaattacagcaccaatattacacaaagacctacctataacctttaatgttaaggaagataacggaatgatagtcttgaccactcataagcagcttcccattccactaaattcaaacaatgatgtttattattttaggaatgaactctatttaccttcaaaaaatcaaattgataattatgctagtctgcatgaaagattattagttcatggcagaattacctataaaaaagatatagatacttacactaaactaatgtctcttttaagtagaatttcgagtaacataaatattgcggaaaacttaagaaattatgcatctaatttatcaagacctgaattctttttatatgaagggaacggaaaaatttattgtgatatatttcttagctatggtaatacaaaaatcaatatattagatgagagaaatgtttcgcatacgttcataagagatgataaaaaagaagaaaagcttcttatggaagttgaaaaactaagttttgtaaaaatggataacagacttgtatttataggtaaagatgaagagttgtttaatatactaagcaaaaaaggagagacaatccactccttgggaaatgttatgttaggaaacggccttagcaataaaaaaatatatgatctggattcaattagagttgatttagatgaagtggacggaagttataatttcttttatagtataggggagttaggaacaaaggaattaaatagtgcattagaggcatataaagataaaaataaattttacaaaacaagaaataataactttttagattttgaagataatggtgtgagaagtttttttaatctaattgaagtgttaaatataaatctggattcaaataatgaaaaagttaaaatcgaaaagaataaagccttatgtctatatgaaaatatgaagaatataggtttagggagtatagaaaattcgaatgaattagatgatatagaaaataagttagacaacataaataataaaaatatatcaatcccaagtgattttaaaggaatccttagagaatatcaaattaatggatttaagtggctcaagaccttaagtgaagtgggatttggaggaatattagcagatgagatgggattaggtaagacaatacaagttatagcattattattatcagagaagaacaaaaagacttgcataatttgtccgacatcattgctttataattggaaagatgaatttttaagatttgcgccaagtttaagagttgtgatgattcatggaagtcaaagagataaagtgatggaagatatatgtgaatatgatgtagtgctaactacctatggaacattgagattagatatagataattatagagatattgtttttgattattgcataattgatgagggtcagagcattaagaattcggaagcgcagaattcaagagctgtaaaagaaattcaggcaaaaattagatttgctttaactggaacacctattgaaaataatttaacagagctttggtctatatttgactttataatgccaggctacctctatgctaaagaaaagtttgaggaaaaatttatttcaagaagggaagagaatttagagaatcttaagactatgataaagccttttattttaaggagaactaagaaagaagtaatgaatgaattaccagataaaatagaaaaaactttattagttgaaatgacaccttctcaaaaagctgtgtatagtaattatgtaaaaagagtaaaagctgcaatgaaaaataacaaagatggtagaatcgagatattctcatacttaactaagctaagggagatatgtttagatccttcacttatacttgaagactataatggaggaagtgggaaaatagaagaagtagtagaaatcattaaaaatcatattgattctggtgggaagatacttctattttcacaatttacttctgcattagataggattggggatcgcttaaataaggagaaaatagaatttttccatttgagcggaaaaacaaatcctaaaaatagaataaaaatggttaaagattttaatactaatgagtttgtgaatgtctttttgatttcattaaaggctggaggaactggacttaacttaacatcagctaatttagttattcattttgatccatggtggaatccagcagttgaggctcaggcaacggatagagctcatagaattggtcaaagagatgtagtagaggtgattaagttagtatctaaaggaactatagaggagaaaatcattttgcttcaagaagataaaaaacaacttattgacagtattttaacgggagaacttaaaaatagcggcttattaggaagtttatcaaaagaagatttacaacaattgtttgagagagattaaataattgttgtataaatataaaaagatattagtaagaaataattatgttgaatgaagacaagctggctaggtttttaatgttaattgaaatctataaaaattatatatttctatgagtataaaattatctgaaaaatattttcagataattttattatttaaaggaatatttgaaaataaatacctgttttgattgcatgtatataattatcaatagttatctactataatgtaaatgaacaaaatgtaatactaagtacgaagcataaacgtctaaagattaggtcattcttctacctggcgatgatctaacttattaaattcgtttaggcgatactccatgtttttttcataatctttgttaaagatacaagagaatatgacatctaaaacatattgtgtagcaatatgagatgaatagtgagaaattttcttttttaaattttctttgctagaaacaaatatatgatatttaaataacttagttaaatagttttcttgagctgaacagataactaaggtttctatttccttacgttttagaactaaagcaatttccttaatttcaggtgtcttaccagaataagaaagaataattgcgacttgcttatttttattattagaagcggcagcacggtatacttggttcattggaattagtgaaacattaacgtatctaccgatgctttgcattttatcttgaaagttcaatgccgtttgtatgttatttgtaacggcataaacatcgactatctcggcattataaattaaatcaacagcatcttctagctgttcggaattaaagaaggaaaaagtgttggttaaggtatcaatataaagctgcttaatgttactagcgatttgaaactgtgtatcgtctttcttgaaaggaaaatttatatcaatattttctggcttattcatttttgagtatagttcttcaacaaacttgattttaaattctttgaaaccagttaatccgatttttttacatagtctgtgtatagttgagattgatgaaaaagatactttggctaattcatctagtgacataccagcaacttgctcctgattttccaatatgtaatttgcaagtaatttctctgtttcagttaaattattagcatataaaagtaaattataaattgtcatgatgattatctccttggtgaagtttacatttttagatgaattattttattaatgaatgtcgtgaataaacaattaaatttgtcattaatactttttaaggaaaagtattatgtatgttgataaaataattgctcatcataattctaaaaataattaaagaattttagctgcaattatgaaatatccattaagaattgcaacatatatatttattttagcattaataaaaattattatcatcaaattgaactgaagaattataaacttaaaatatcaattgagttagaatataaattatattgtagaaattataactggatttgagcatctattataaagatgacttttaaagagtacaagcagtttatttttttatgaagaaaattattaagtagagtatatattcacagcacaagattcatacattatttaattctttggagagctacaataaaatcaaatctgaaagtgactttttaaagtagtagaaatatacagtcttagaagcagattttgttttaaatattttaaaaaagtatatataaaaatgcgcaatataggaggaggcaaaattatggcatataaactaatagcttgtgatatggatgagacattattaaatgataatcatataatttgtcaaagaaatattgatttaataaaaagagcaaagaaagagtatggagtaaaatttgtaccagctacaggaagaggttattcttctattcagaatgacttgaaaattttagacttatatgatcaggctggggaatatattatttcttttaatggtggcgctttaacagaaaataaggataacaagctactgcaatttaaaggattaagattcgataagatgaaagaaatttttgagtatggattaaataaggatgtttgtatacatgtttatacaaaagataaattatatatttataatttatcacaaagtgaaaaagaaagaattaaaaatcaaaaattagagtgtactattatgaaagaaaatacagtggatttgcttgaagaggaaccaattgcaaagattatatatcaaaatataaatgttccatatttgatgggtattgagccagatatgagaagtattacagaggggcattgtgctgtaagttattcgtcaaatcgatatatggaatttaattcattaggggtagataaaggtagtggtctaattaatttagcaaaaattttagatatagatattaaagacacaattgctgtaggtgataactacaacgatatgtctatgttaaaagtagcaggtctatcagtagcgtcgggaaatgcagttgaagatgtaaaaagagcttgtgattatacaacagaagctgataataacgaaggtgttgtcgctgaattaattgagaagtttatattgaagaaatagtaataatagttgtaataatattttaggaggaaatttaattatgttagctgattatcatatgcatacaagttttagcgatgattccacttatcctatggaagatgagatcaaaaaggcaatatctttaggaattgatgaaatatgctttacagagcatgttgattatggagtgaaagtagatataaattgcaattatatagcttatataaatgaatttaatagatgcagagaaaaatatatagataaaattactatgaaacttggaatcgaatttgggatgcaagaacatactattcatgaatttcaaaaggattttaatgaatatgactttgattttgttatactatcttgtcatcaggtagataataaggcattttggacacaggattttcaaacaggaaagacacaaaaggaatataatgagaaatattatgaggaaatattaaaagtaataaaaaaatataatgattatagtgttttaggtcatttagatatgattaatagatatgataagatgggaaaatatccttttgaaaaggtaagagatattgtaaaagaaatcttagttcacgtaatttctcatggaaaaggaattgaaattaatacatcttgttttagatatgggttagatgatttgacaccttctagagaaatattaaagttatacagagaattaggaggaactattattacaataggatctgattcgcataaggaagatgatgtaggatgcaagatttcttatgtaaaaaatgaacttaaggaactgggatataaagaattttgtacatataagaaaatggagccaatctttcattggttatgataatagatgaataattaaaaatattagtaaagttcagcatacatggactataggcaaataagttcatttatgctgtttttttatttagtttaatttattattatttaattatttgtaattcaggattgttttatcactataaaaattaataaaatggagctattaaaaaaataattttacatattgcacataggtgttaaaatataggaagattagtttattttgaaagggatatgaaaaatgataagagaagcaacggaaaaagatttagcagatattttagagatctacaatgatgctatattaaatacaacagcgatttatgattatactgcgcataatcttgaggaaagaaaacagtggtttgatgaaaagaaaaaagatggatgtccactattggtgtttgaaaaagatgacaaagctgtaggatttgctacatacggatcatttagaacttatccagcttttaagtacacaatagaacattctgtatatgttcataaaaactatagaaatttaggaatagggaagatattgttaaaggaattaattgatgctgctaatagagatgagtacgcaactatggttgcttgcattgatagtttaaatgacggtagtatcaaaattcatgagaaattcgggtttaaatactctggcacagtaactaaagcaggctataaatttggtaaatggttggatttagttttttatcaactagatctaacaggtcctaagtatccaatagaaaagtaatgatttttctattcttgaaataaatagaagtgttttaagaatgataaagcaccaccagatatcataatttataacatctagtggtgctttttcacttttctattctgctgaatctatttcactactaattgaggtattaaatattaatgaagtaagcattgcacctattagaaaaagtatgcctgctgagatgtagagaatagtaagggaaaattggcttttaagccaccctgtaattgacatagtaataaccatgaatcccataaacattggatttaatactccgtttactcttccaacaaactcagatttcgttaattgaagaattagtgtgttaataccaatttgaatgcaaggcataaaaaatccattaaggaattggaacaatagaattataatccagcttgaagataatcccatgccaaccattgaaattgtgttaactataagtcctattgcaagaagcttttgaggcataactttctttgatattgtcataactaatccgccaccaataaacattgctgatccatttaccataagtaataattgaagattttctttaggaagaccaagtctttcaacaattaagaaaaccccaagtggttgtatgataccaacagcaaggcctgatacagcaaaaacagatccaagtatagttaactctctttgctgccaaacataggcgaaaccttcttttaattcttccaagaaatgatttgcagtttctgtcttttcaattatctcatcagcgggtaatagggttaatactgaagctgatagtaagaaagctacacccattactgatatagaaatatctattccaaacttttgaaaaacaatagtacctaatgctggtcctataatcataaaaatagacataagagtttggaaaatagccattccagtttgcataaactcttcaggaacatggactttaaataatttcattgcagagggctgagagaactgagacaaaatagatgaaataaatgttacaaaaaatacagcttcccaagttgcaaagattattgtaagcagaacggcaaaaacagaaatagcacttagtaaatcacaccaaaccatagtacgcttcggtcgccatctatctgcaaaggttccaccaataaatgagaatataaatattggagcaaattctgcaactgaaattaaagaaacagcaatgggattgttattagtcttctccattacaaataacaatatggcaaaattacgaacccatattcctatttgtagaaaaatagaagaagctataattactcgaacaaatctattgcgaaaaaatgaagacattgacattgtcgattttgtcatataattacccctcttaaattattgaatattttattatatactatatcataaatcagtagcacatcaagttaaaatataattataatgttgtataaatagctaagttaaaatataattataaagttgaccttaaaataaacaaaggaaatttataaggaagtgatttaaagatgaattcaagaaaaagaagcattgcagcagcattaatggtagcaatgtttttaggagcagtggaaggaactgttgtaacgacagcgataccaacaatagtgaaggatttacaaggatttgaaattattagttcagttttttcagtatatttactaacttccgctattactactcctatatatgggaaactatcagatctatatggaaggaagaatatgctttcaattggaatagtaatatttttaattggaagctttttatgtggattatcgcaaactatgtacatgctgataggagctagagctatacaaggaataggggctggagcaatatttacagttacatatacaattattggagatgtatttacattagaggaaagaccaaagatccaaggaataataagttctgtgtggggaattgcaagtttagtagggccatttttgggaggaattttaatagatttattatcttggcattggatattttttataaaccttccctttggaataatatcagttgtgcttattcaaagaaatttggatgaagttttcgaaaagaaaaaacatagtatagattttgctggaattataactttatcactggcgatggttatatttttgaatatcttcttatcaaatgaagatatgagttctagcaataacatatttattttattatccgttattgcaactgttatattactagttgcattctgtataattgaaagaaaagcaaaagagccaattattccttttgatatatttacaaagacaacttcaattgtgaatttaataagcttcttggcttcagctatattaatgggttcgaatgtttatctcccaatatacatacaaaatgtacttggatacagtgctaagatatcaggcttgtcactagctcccatgtcatttgcttggcttatagctgcagtaattttaggaaagtgtatagtaaagtttggtgggaaaatagtaatacttatatctaatgttatcttactaattagtacagcgttattgcctacattgaatgcagaatcttctatattattagtaataatatatgctttcataatgggatttggatttggtggagcatttacaactttaacaataataattcaagagtcagtagaatataacaagagaggtgctgcgactgcggctaattcattgcttaaaacaataggtcaaactataggagtaagtatatttggtagtatatttaatatatatataattaagtattttactcagttgggaataaatggagttgatccgagtaatttgtataattcagcggtaactgatgaacagataagactctcattaaacagttcattacactttttatttataatacttataggaatagctgttatatcgttactttcatcaatgataatgcctaaaataatggaaagttctaagacagaggagaacagagcataaaatagaggttgaaaatttattaattactgtgactgtatcatattaagttttttaattattatgatgtagtcacttttttattatataagagtttgaattggagtgaaataggtgacatctaggctactctgaagcataaattattaataaagctaattcagaaggggacattttaaaagagaacaaaaaggaaaatatattcatcccctagatatttcttagttgaatttgaaaatgcagataaaaaaatctcaggatacggaatcacctgagacttttagcgatagaaaattttaaaaatttctgttataaaaatttgaatgatttttagaagctaaatctaatgagcaaatacagcttgttttgcttttgatacaactgcacttaatggtaatgctattattataccagtagatacttgaattatatttccaactatatctttagctgaatatgccattccttgtattagcccaattttctctgttaaaaagcctgatattattattccagcaaaaaaatatgcaatcaccataaatataccactggatacaaatgcaattgtataccttacagtaactttgttttctgacattttttctaatatggatcctgcaatataagccattccccatttaataattagcgtaaagggtgcccaaaaataatatccacctaatgcatcaacaagaaacataccaagagcacttgaaattgctccttttttcttacctagaactattactgataagaataccatgcagtcccctatttggacaaagcctccaactgatggaattttaattatgcttcctgctatataggttaaagcaatcattagccccattaatactagttcactagtatttaaagatttacttctttccataaatattacctaccttttttataaattacttgctgtatatgaatacaggtttttatagtctttgtttattatatctagcatgctttatataataaaactcaatacaaataataaaattattatattaatatatgtacaatttatcaaatgtatgggtacacatacatttgattgggataattaaatcaaatatatatccacaaaatagtattggaaaaaatctatttaagtaggctataatgtaaatataaattgggcctaatgggaggagatataatttgagaatattgcatacagctgattggcatttaggtaagaatttagagggacaaagccggatggatgagcaagaagagtttttaaatgattttgttaagattgtagaagataataatatagatttaatcatgattgcgggagacgtttatgataatccaaaccctccggcaagggcagaaaaaatgttttatgatactttaaagagactatcgaaaaatggggagagacttactttggttatatcaggaaatcatgataatccagagagattggttgcggcaggtccacttgctcgtgatcatggaatcattatggttgggacaccaaaaactatagttccttgtggtgagtatgggaaacataaagttttgtcatcaggagaagggtatgtggaagttgaaattaatagtgaaaaagcagttatcttaactgtgccttatccgagcgagaaaagactgaatgaagttatctataactatatggaagctgaagatgaaaaagctaaatcctatagtgataagatattttctttattcaattcattaaaaaatcattttagagaagatacaattaatcttataatatcgcatctatttgcaatgggaagtgaggaaggtggctctgaaagaagcattcaattaggaggtgcttatatagtagatggaagttgttttcctaaggaagcacagtatatagcattagggcatgtgcataaaccacaaatagttccgggaacggataaaagagcaaggtattgtgggtcaccaattcactataacaaaaaagaggttagctttgaaaagaaatgttatatagttgaggcaaaagctaatgaagaatgtgacatacaagaaataaacttaagggtatataaaccaatagaaatttggaaatgctcaagtattgaagatgcaatattacgatgtgctgaaaataaagataaagattgctgggtgtatttagaaataagtacagatagatacataagagaagatgaaataaaacaaatgaaagaattaaaagcagatatattagaaataatgcctaaggttaaaggattggaagaagagagtgaattaaacttaagtgaaaaatcgtttgaggaaatatttaaggagttttatcttaaagaaaggggcactcctccagaaggtgaagttatggaattgcttttatcaattataaacgaagagggtggaacagatgagaccaatcaaattgaggattaagggcttaaatagcttcatggatgaacaaattatagattttgataaattaacagatagaggattttttggaatctttggaccaactggaagtgggaaatcaaccatattagatggaataactctagcattatatggaaatgtatcaagaaaaagctccaattttataaatactaattgtgacagattaaatgtaaattttgagtttcaaatatcaggtagtgaaataagaaaatatatcattgacagggagtttaaaagaaaaaaagatggtggaataagctctggaaagtgtaaaatcgttgaagtaacaagttcagaagaagaaattttagcagatggagttaaaactataaataagaaagttgaggagatagtaggtcttaatttagaagatttctcaagaactgttgttttacctcaagggaagtttagtgaattcttaaagcttgaaggtaaggacagacgtgatatgcttgaaaggttgtttaaccttcaacaatttggagacaatttatccagaaaacttagtgcaaagataagcaaagagcgaactgatagcaatattttagcgggacaattaagtggatacagcgatgttagtcaagaaaaattaaaagaaaaggaaaacgctcttgaggaattaaaaaataatctggaagctttgaaaaaggaattagatataatagaaaagaagcataaagaaaatgaagaaatatggaagctacagcttgatttactatattataaaaataaagagcaaacattaaaggaaaaagaggaaaacataaattcatatatagaaaagataaagctaggcgaggcaggagcaaaggtactaccttatttaaatgcatttgaaagcactagaaaagcctttgataaaaatgagattgagttagaagaattaaaatcaaagataggtaagataaaagaagaaaaagaaaagatagaacaactttggtgcatggcaaaagataaaaaagagaataaacttcctcaattaatgatgcaggaacaaaaagttaaagatgctattgaagaaaagaatttgatacgtgagatagaaaataaaatagatttattaaaggcacaaattaaagaatgtgatgctaaaaataataatatacagagtgagctcattaaaatagaagaagaaataagtaataaaaataaattaataaaagaagacgaaaaaacatatgataatttgaaaattgaagaaagtttaaaggaagcagttcaagaaggaataattgtagaagaaaagttagaaaaaataaatggaattctagttaaggataagcaaaagaaagcagttattgaaaaagaaaatagtgaaactatacttaaaggaaaagctttaagggaagttttagataaagaaaaaaagagtttggaagataaagataaacaatatgagtttttacttaaaaattcgccaggtgaacaaaaagatttagttaatttaaaacagttgatagtggaaaatgagcaaaaatggagcagttatgtaaagctgaacaaagaaatagatttctctagagaagagataaaaaacttacaaatagatatattaagtagaagagaagaagaaaagcaacttgaaaaagaactagaggaaataaaaaatactcaaagggaggttatgagagaaaatttagcacatactcttagacaggaacttaaagatggagatacatgtcctgtatgtggatcaactcatcatatgaaagaaaatatcaggatttttgaagttcaagatgtgaagaatgtagaggaaaaaataaaactaaaagaaaattcaataaagattattagtagcaaaataactcaaggtgaaactaaggtaaatagttttaacgaaaaaattaaagttaatcttgaagaaattgaaaagctcggaactgcgtttaatgaaaaacctttggaagagttaaaacaggaatttataaatttagaaaaagctttagaaagttattctaaagctaaagaagaacttgaaaaaagtgttaataagctgaggaatgaaattaatattaaaaccggagaaataaatgaattacgagcagtagttagaactaaccaaagacagcttgaagatttggaaaagagtattacagaaaatacagaagaattgaatattttaaaaaatagattggattcgctaagggcaaagacattagtaactgattttaataaaaaaagcgaagaaattaaagctgttgaaaaagagagagaaagattatcagaggttattaaagttaacagggagctaatagaaaagttagaaaagaataaagaaaatttaactagtgaagttattttagcaaaagaaaatttaactaggtataatacagaattaagtaattatgaaaaaagtaaagaagaaaaaatacaagcgataaagaacaaagtcgataatacagatgatctggtttcactactacataaaattcaggaaaatattgaaaatattaatagtgagtttaaggaaagtgaaaacaataaaaataaaatagagaaagaatttaatgaaaacaatgagcgattaatttctgcaatcagtaaatataaagaattaagtaaacgaaaaaaagatgaagaagctcagttagaagttgcaatagacagtgaaggttttaattcccttgacgatgtcaaaaaaaatataattggaaaagaagaaattaatgattataaattaaaagtagaaagttataaaagtgaagtatcaaaagtaaatggagcaattgaaagtttacttaataaaatagatggtaaagagttaagtgaaaaagaatatacagaaataaaactcttaaaagatattaaagaaaaagagtttaatgaaattaatgaagacaaaattaaggtagatgaagaattaaaaaacataaaaaataagttggaagagcagaaagatctcttagataagaagatgaaactagaacataaattggctcttcttggtgatttggaaaagttatttaagggaaagaaatttgttgagtttgtagcagtaagtaagcttaagtatgtttcagttgaagcatctaagagattgaaagaaataactcatggaaattatggactagaggttgatgacaatagcagatttataattagagattataaaaatggtggagccaaaagagattctactactttatcaggaggagaaacatttttagcatctttatcattagctttggcattatcagcacagattcagcttaaaggaactgcaccattagaattatttttccttgatgaaggatttggtactttagatgatgatctacttgaagttgttatgaattcattagaaaggattcataatgaaaaattgaaggttggtataataagccatgttgaagcaataaagaatagagtaccagtaaaacttatgattactccagcagaatcaggtatgggtggaagcaaagttagaattgaaagaaactaaatttataaaaataacaagttttatattaatatattacttgttattttttgtgtaaactggtaattaagtgctataatatacattgtaattaaattacgaaaataaaaatttaatagatattagaggcgattttaaatgtttaattgtaagtctaacttgattttatcttttcataattcttcagataaaattaatattagaaaaactattagaccttgtaaatgtaataggcctatttattttattccaacgtgaatgtacattcctaaaatgtgaattaaatacattgcaagaaaatgaaaaataaatttttaggaggtacttataatggaggaattaaatttaactaaaagaataaaaacagctagtcatggtgctagaaaggtaagaagagaaggcaagattccaggtgtaatttatggaaaagaaataggaaatgaaatatttactgtagatgaatcagcattactaaaagaaacctcagctagtggagagcatggaatagtaaaatttaatcttgatggaaggaaaggaaacgctgtaattaaggaaattcaaagaaatgctttgggaaataaagcaattcatgttgattttgaagaagtagcagcaaatgatacaatgcatactgaagtcttaattaagattgttggtaaaggcattttagaaagcaaaggattaatattacaaactcaaagagatttagtaaaggtatcttgtaaagcaaaagatttaccaaaggatgttgaattagatgtttctaatggacaagctgggacagtttatacttttaaaaatctaaaatttgctgaaggaattgaagttttagatgatttatcaacggttataggatcaataagtgaagaagaaaaggctaaggaagaagaaacagaatagaattacagataaacagagttaaattttaaatattataatcaaccattttaattgagcattagatggttgattttttgttttttagagtatgtatagtgaatttatgattgttatgaaaaatgacagtgtttcaaagatatattttaggataattttaattattagagttaatattatagattagaagggtaaaatgcttggcaatgcatccaagtttttatatatgatgcaaaatatataaaagtgtttttatattatggataaatattgtataatgtataggagaaaaaacacagagaggggatcagaaaatgaattataaggaaaagtataacgtgtggattaactctgactttattaatgaggaaactaagaatgaattaaagagcatatctgacgaaaaggagattgaagatagattttaccaagatttagattttgggactggtggattaagaggggtaataggtgcaggaagcaatagaatgaatatatatactgttgctcaatctactcagggatttgctaattacttaaatgataattttaaagatccttcagttgcaattgcatatgattcaagaaatatgtctaaggaatttgcaaaagcagctgcacttaacttatgtgcaaataatataaaagtatatttatatgaaagtttaagaccaactcctgtattgtcttttacagttagagaattaaaatgtaatggtggtatagtaattactgcatcacataatccgaaaatttataatggatataaagtttatgatgaatttggcggccaagtaacagatgaaaaagcaaaaatgataattaactctgttaaagcggtagatgatttctcaaagattgaaagcatagatgaaaatgttgccttagataaagggctattaaaatatattggagaagatgtagataaggtctactatgaaaaagttaagggattaactataaggacagatttagttaaggaaaaagctagtaatttaaatgtaatatatactccaattcatggttctggtaatgttccagtaagaaccgtattaaaagaattaggctatagtaatgttaaagttgttaaggaacaagaagctccagatggaaatttcccaacagcatcgtatcctaatccagaaaatccggatgtatttgaattagcattaaagatggctaaaacagaaaatccagatataatttttggaactgatccagattgcgatagaataggtcttgtagttaaagatagcactggagaatacaaggtattaactggtaaccaaacaggattattattaactaattatatattaagttcaatgaaagaaactaataaattgccacaaaatggtgttgtaattaaaacaatagtaacaacagaaggtgctagaagtattgctgaagattttgatattgagcttatggatgtattaacaggatttaaatacattggagaaaaaataagagaatttgaagatgcaggagatagaaattatattttcggatttgaagaaagctatggatatcttgctggaaactttgtacgagataaagatgctgttattgcagcaatgttagtatgtgaaatgtgcttatattataaagaacaaggcaagagtctttatgatgcattaatagatttatatgaaaagtatggatattttaaagaaactcttgtatcattagaactaaaaggaaaagaaggtcaagagaagatagcaaactgcattgaagcactaagaaataatccagcaagtgaagttaatggtgtgaaaatcgttacaagattagattacaaattaagtgttgaggaaaacactgtaaataacactaaggctcctattgacttacctaagtcaaatgtattaaagtacattttagaggatggttcatattttgtagtaagaccatcaggaacagagccaaagatgaaagtttatttagcagttaagagcaacagcttagacaatgctgagaaagatattgctacatttaaagaaaaagtaatggaaataattaattcacaattaagctaagtttccataagtagagagctaaaatctgagattttgtgtgaatcagttaagcagacagccaaatctgtgatttgatgatggtcgcttactctgtgagtactcagcgaacgaatgtgagtcgagtttccttataaattgctatcatcttttggtgatagcaatttctttaattatgaaatcaaaaagtgaatgtccaccaattattattaatgaatacttaaacaattgataaatttaatgtacactgcacaattaagaaataaattcttttaagaaatttatagaattgtattattacaaatttcctgggaaatctgctcaataattgtgcattctaaattttagaattataaattggttaagtattgataatgataattaaatatttgacttattagataaacatatttactagatcttcagcaatattttcatagcttttcggaatcaaaatatttatgatttcggtaagttaccatataaatttagttctagagttggatatctataaagtgagatttaaacaagaggtgtaaaatgagtaattacaagacaatgtataaagataaattaagtaaattattatttttagaaatgaataaagaagggttcaaaagaagtcttaatataccagaaggcgttaactttaagaatgatgatctgtatttgcctataagctcggattatgttgtatcaaatgtaaatgatgaagttaagttaagtaacctgcctatatattactttgtggagggtatatttattacttttggagcagataaaaatgttaaatataatgatgattatggaacaattctatcttatataccagatgcagaagaatgtgtgaagagtcttattgcagatagaataaaaaaagatagattagaagatgcttatattctgctaaaaggtctttataggtatacaagagaagaagaaattttaactaaacttctagcgataggagagacaataagagaaaaagattctggattttcggaaattttattagaagatattgaagaatttaaggaaaagtttgaaaaatcgccagaaccacatctgtataatgcattaatacttaaagatgatggtgattataaaggtgcagaagtggaaataaatgagtatataaataagggtggtaaaaaaacggatgaaattgataagataataggggatattactaatataagtcactttgagaaagcggttgaatatttaaaagatgaacctaagaaagcaatagaattgttattaccactaagtgaagaatttaatgaaaatcctttagtttattactatctaggtgttgggtatagaagaattgaaaactataataaagctattcattacttgaataaaagtcttactatagaatcaggaagtcttgaaacagttaatgaacttggaatgaattatgcatgtattggtgaatatgaagaagctataaaatattttagaaaagcctttgaagcttctaaggaagttgaaatctgtactaatatagtaatgtgctatataaacttaggagacaaagagcaagcaaaaattcatttggaacttgcaaaaaaaatagctccggaagatgatatcgtaatagagatagatcaaatgttaaatagaactataaaataaacatggcaatgtatatttttcaattttgaattttggttaacatagttttttatttgttatcagactttaattaataattgtaaattctatacgatatattgcctaagatttaggagataaatatgtttacaaaaatacttgattttaatatttttaatagggataaaaatgcgttaatgaactatattgaaaattttgaaaaggtaaatataatatctggaaatccagaagttctctttaatggattaaataatcttgagcttaaaaagaattttaaaagcgagagttcaattattataccagatggagttggaactgttattgcctcaaagatattaagaaaacctgttaaagaaaagatagcaggaattgatatatttagagagatattaattaaagcaaatttagaagaaagatctatatatttattgggctcgaaagaggaaactattaaaaaatgtgttgaaaatataaagaatgagtttcctaaactaaagatatctggttttcataatggtttttttgatttaaataattgtagtgatataattgaagatgtaaaaagtgggaatccatgggctgtttttgttgcaatgggttccccaaggcaagagatatttattgaaaaaattattggaaattcaaatgtgcatatctttatgggggttggtggtgtttttgatatatttgcaggtgagctcaaaagggcacccaaatggatgatatctctaggcttagaatggttatacagagttgcgaaagaaccttttagaataaagagattaatggctattcctaagtttttattgttagtattaaaatataggaataagcagattagtgtttaatagaaaagctgaacattataacacagaaataaataggtgattaaatgaaacaaaaaagtagcttaataaaatctacatttgtaataatgatagtatcattgattagtagatttttaggttttgccagagacatgcttattgctaaaaattttggtgctggaatatatactgatgcttataatattgcagtgtctataccagaaacaatatttactttagttggacttgcaatttcaactgcatttttgccaatgctcagcaaagttcgagctgaaaagggacaaaaagagatgaatgattttgcaaacaatataataaacatactttttattatatcattctttctttttgttataacaagccttttttcgaaagaaatagtccatatactggggccagctgaggaaacaggactaattgcaataaagttattaaggattacacttgtgaatatattatttttatcggttaatgcatgttttaccgcattattacaagtaaatgaagattttgtaattccgtcaattttaggattgttttttaatttgcctatgatattatatttattgttgtttaggaattatgatattttaggattgaccattgccaatgtaatagggaatttttttagagtagcagttcaggtaccatcgttgattacacatgagtataaatataaactttttataaactttaaagatgatagattaaaggcaattatggtattgattcttccagtaattataggagcaggagcgaactcgttaaatatggctgttgatcagtatattgcgttgaagctgccagatggttcagtctcagctttaaattatgcgcagaagttaattgtttttataaatgcaattataacaacatcagttaccagcgtagcatatcctcttatggctaatatgagaaatagaggagatgtgtctgggtttttagagattttaaaaaaatcaattatatatttatctatattattaattccaattagtgttggagttatgatatttagtagagacataataacaattgtatatgctaggggcgagtttactggttatgcgataaatattacaacacttgcattgttaggatacggagcgggaatattttttacaggagtaagagatattttgaattcaactttattctccagtggaaagacaaaagtgacagcaataaatggtataattggtgttgtgattaacataatatttagcataactttatctaagtatataggtattatgggaatagcattagcttcagttatagctatgatagtaacatcggtactcttatttataaatataattaaattagaaaaaaactttaacataacagagatattaaaaaaagtaagtataataataatgaattcaataatcatgggagcggtacttttaacgttattaatttacttcgaaaataaatttaattcaattacaatcctattacttggagtgagtattggagcagctatatatcttggtttatgttatttattcaaggttgaagaactagtggaaataaaagaattaattttaaaaaagataaaaagataggaggatggtatatgaagatattatttattgcctgctattcaccattgataaataattcagcagctattgaaactttacaatatctaaataagttaagtgagattaatgataatgaagtgcatcttctaactgttaattttcctaaagattcaatatattatgatgaagtattacgctctatgatgaatgataaaatcaaaacgcatattattgatggtggacttatctttaaaaagtttatgccaagaaatagtgaaagctacaataattcgccttcaaaaataggaaatactaatagaagaaaagtattacggaaaataaaaaatgcattagcaataccagatatgtattattcatgggcaagaaaagcaggaaaatatggaatagagttaatggagaaagaaaaatttgatgttatattttctatgcatgagccgccatcttcacatttatgtgcttattatataaaaaagcagtatccaagcgtaccatggattacttactggagtgatccatggcttaaagattcaacaagagaaaaatcttttattgtaaaaaaggttttagaaaagaatatggaaagagatattgttaatctggcagataaatttatatttgtgactgatgccaatagagatgaatatttaaaagattataatattttagataatagtaagacttttatattaaatagaggttttgatgcgaaattatacgataaattattacatgagaaagcgcctaagcttataaagaaagataaacttaacataatatatacaggagaaatattttctaagcttagagatataggaccttttgtaaaagcgcttgaagaaataaaaacagagaacttagaaatatataatcagttaaatgtgttgttttttggaaatatagatgatatagaggctaggaagaaactgcaaaatttagaaatagcgaatgtatcccctagaataccattcgatgaggcgcttaaatacatgttaaatggagaggttttgcttttatttggtaataaaaattcaaagcaaataccagctaaaatttatgactattttggggcacaaggtaggatatttgttatttatggggataaagatgatccaattaaaagagtggtagaaaatcatagaaaatgtgttgtaactgagaataatagtaaagaaataaaaaatcatatctataaattaatagaaatgcataaaaataataagatatattgtgagccagatatcaattacgaatggaattcaattgtggaaaggttgaacaatatattagaaggaagtgaataaatgcacataatggttattccatcttggtattcatctccaagaaacaaagttcatggaagtttttttaaggaacaatttaaagctctttcaaatagtggagagaagattactgtcgcatacaatgaaatttggcctattactatgtttggaaaaattcatgaaaagagaggcataaactttaatgtagaagataaccttagaacttatagatataaagattataattatttacctaaaagtccattaatgtttaagagtttcaataaaagaatggataagatgtatcaagaaattgttaaaaatgaaggaaaggttgatattatccatgctcattcagctttttgggggggaatagctgcttcatatataagtaagaaatataatgttccattagtattaacagaacattcatctcttaagtatgcaaagtatactagagaaagttataaaaaatatatttacaatgcttatgaaaattcggattatttgattgcagttgggtctggattaaaaagagaaattcaagaatatgtaaataaacctatcgaagttattcacaacatggtagatttgaatctattttctgtggatgaaaatattaaaaagagtaccaatatggatgaagattttaaatttttttcatgtgcttttcttgaagaaggaaagggaattgaatgtttaattaaagctttttctagagttttcaaaaatgaaaatgtaggattaagaattggtggagacggaacccttaaaccatcattggaatcacttattaaagaattgaatattgaaaagcaggtaatacttctaggagctttatcgagggaagaagtttcgaaggaaatgaaggaatgtgatgcatttgcattaccatctgaacatgagacatttggagttgtatacattgaagcgcttgcatgtgggaagccggtaattggagctgataatggtggcgcagaagatattataaaagaagataatggaataatagctaaaaagaatgatgtggaggatttagccgaagcgttaagaaaaataaaagaaaatcataaaatgtatgataaatataaaattagagaacaaacaatttttagctattcagaaaaagtattagttgaaaagctaaaaggagtgtataaaaaagtatatgagagaagcaattaaaaatatatatgatttcttagataataaattttattttaagttattgtacttatttgtaagcctaacatttgtaactatgctcaaagatgtgccaggaataaaaattctaagcaatataacaatagcttgggggatgcttttaattttattcatggttatcgaaggatataagagaagaaaaatttataaatttgatattccattggcattatttatgatagtgactttaatatttaacatttttatctatagaagtgttaataacattaaagattggattgttaatttgattatatttgtggtaatatttacagttgatgtatttagagcaaaaaagaagcttattaaagagatgaacataattacctattcttatgtaatctttatgatggttgcttctattatatcactggcaatgagatattcgggaataaatatagaaatcggacaagtggtatttggaagcacaaagggagtctttgaaaatgaaaatgctctttctatagcaacttcattatctatagttatgtgtgtatatctcaattatatatcaagaagtcacaagcttaagatgttgtggatgggaaatataatattacaggcagtaactatgattggttcacatggaagaagtgcatatttggtgataatagctgtaatatatctatctatatttatatacagtaaaaataaatatattagagtggcacttgttttagtaccaatacttttttgcggagtattttttgaaatggttaaaagtcatttggaggcttttacaacagagaggaatattatttggacttcagcatctgtagtaatagaaaaaaatcctttgactggtgtaggaaatagtaatcttatagaagcggttagaaatgcaagaataggaagttatttacctggaattgaacttggagggatgcataatatatatgtgcaaatagccgcggtaaatggacttatttcgttactactatttcttatgttcatagcaatgatcttggtgtttataatacaacatctagataagttaaacagaagagaaaaaaaccagatgacagtaataacatcaattatagcgggtattcttgcagtaaacttatttgaaagtgtattagtatatacaataagttttatttcaatgatattttggatatacttagggtatctagtatcgattctagataataaaaatatagattaggtatcagcaataagtaatataaaaaaatacgactatagataggggaataatattatatgaaattttgtgacgaaactataaaacaatttttaggtgaattagaatcagatttgccagctccaggtggcggaagtgtggcgggtcttattgcagcattatctggtgcattgaattctatggtttattctctgacagtagacaaaaaagcatatatgagtcttcaagaggatgaaaaagaaagtataataaaatttcaaaaggaatctaaagagttcactgtaaggagtttagaacttatggaagaagatagagagaactttttgaagttaatggattcttataagttgcctaaagatactgaaaaagaaaaagaaaagagaaaattggctataaaagagaatactataaagtctatggaagcgcctttaattttagctagagaaagcttggaattttataagaaccttaatgttatggcgaagtatggaaataagatgttgctatcagatttagcaatttcagcaattttactacattgtgctatagaaagttccataataaatgttaaagtaaatttaaatgggcttagaaatgaagaattttttgagaaacttgatagtgaattagatagtatcatagaaaaatcagctaaagaaaaagaattgattacagaaacagtaaataaaataatttatcccaagatgtagcaatgcaaaaatgattaattataataagagatacttactaagaattcaattaaagtaagtatctcttatgtacttttattctactggttctccatcaaaattttcgtattcgggcctattttttggatcgcccacattatcttggttagcatgaagtcttcttcttcttacacctttttgcattggattgcttgatcctggtttgtgtggtccatctttacgtggcatatgatacacctccttttttatattttgtgctcatatgaggttttgatacgtttaattttttggtgattaatggattaataaatgactaaggaataatattaacaagtattgaaaaagattgcatatgtactgtataatatttattaacataagatatatattttgaatataaaaaatatgcataagttcaggtttcacttagtctgtctatatattatagtaattttaaggaggaattagcattggaaaacgcaaaatttcctattgttttaaagaaaaaaaatggtgtaatgataggagttgcaataatagagataattataggaataatctttggagctttacaaggaggattaaaaagtgctcctatgtgggtgcttttttttgcaggaatagttaccgcactttcagtttttgtggagtatagtcaagacatattaattaaagaggatgcaatagagttctatagaaataatgatttaataaaatcgattaagtatagtaatataaaagctattcttataggtaaaggaaatgagcctaaaaataagagaaaagatttttttataattagcttttataaaaatgataagaagaagaataaaaattctgcagaggacacgtacttaattaatcctatgtcgtatagtgcagaggattttaaaataataaaaaatattattgtatcaaaaaattcttctgttaaagtaagcgaagatgtaagtaaatttataaaataataattatataaaatactggtttaggagatactttttaaaagttctctaactagtaatgataagtagatgactatagattaaaaaaataaaagttaaaacattttagtatgtaactaagataaatttaaaacacactaaaatgatataacttttataattgaatatctatagttattcttgttttgaaagtatttaagtgaatctaaccattgtatatagtactggaattgttaatatactctatggctggatttactattccgtaggtaaatcattaagtgatttgaattcgtaaccttccttttgaagtgttttaataactgatgataatacctttgtatttgtgtttgagacagcatgcagaagcattatggaacctggatgggcacccttgcatatcttctctacagcataactttctgaaggctgattatttactaaccaatctttataagcgaaactccagaatatagttttataccctaaatcctttgtcattgctaatgatttttttgaatacttacccataggtggtctaaaaaacttaggcatatcctgaccagtaagttctttaaaagcattctctactccagtaaattctgcttcaaatttttctttatcacgtatttgagctatagaaggatgatgaactgtgtgattaccaactacatgtccttcatcaaccatacgttttattagttctggctgagtgtctatgtatggtttgacaacaaaaaaggctgcaggtacttggcattcttttaatatatctaaaatctttccggtattaccattttcatatccttcatcaaaagtaagatatagaactttttttgatgtatcacctaggtaataagcagaattttcttttaagaagctaacggattcctttggaccttctgcaatttgatcttttcctttaccaacgtaataccagttaagttcatcttcatcactaaaagaagaaaaaatatctcttatgttatcaacatctaaaatatctccaaagacaccatcttcttgaaaacattcatttgaatcggtatcattatcacttgcagcaagtgcaggtttttgaggaacaagagtaattagattcattgctaaagaaagagcaattaaagattttatagacttattcattttctcaccttcaatcttaaaaatttacatatttaattcagatttatccaagaaaaatataaagtgaatattagttgaactttatctagagtcatgctatcgttatcttccacttgaagaaatggtgatattacagtagctatagataagataaaattcaattgaagacattgaataaatgcttaaccaagtatagtatttgaatattgggtaggaataaccgtggtaaattatatataattttagtcccaaaggaatacttgcacatatgtcgcttattaggtaaatcatataattatttaaacttaagtttatgagggattaaacatttataatatagatctaattagtttttttgaattactattaagtgcagtatcttagtatataatttttcaatagtaattgattattacagatgcctgaatatgccttttgtgataatataaagttgaaataaaaaaggttctagagtataatttttaaaggtatattaaaagttaaggtatattttgaatatctttaagtaaaagttcgatataagaaaggaatgtacatagatgaaattaggtatggtaggtttaccgaacgtaggtaaaagtacgttgtttaatgcgataacaaaagctggagctgaatcagctaattatccattctgtacaattgagccaaatgttggtgtagtaagtgttccggataaaagattagatgttttagaaaaaatgtataatacaaagaaaaaggtatatacagcaatagaattttatgatatagcaggattagttaaaggagcttcaaagggtgaaggtttaggaaataagtttttatctcatatcagagaagttgcagcaattgttcatgttgtaagatgttttgatgatggaaatgttgttcatgttgaaggttctgttgatcctataagagatatagaaactataaatttagaattaattttttcagacttagaagttttagagagaagaatggaaaaatctataaagcttgcaagatctggtgataagactgctaaatttgaatatggagtaatggaaagaattaaagaacatttagaagcaaacaaaccagttagaactttagaagttactgatgaagaagaagcttttataaagagcttattcttaattacttcaaagccagttctatatgcttgtaacatctctgaggatgatgttatggaaggtaattttgataatgattatgttaaaagagttaaggaatatgcagttagtgaaaattcggaagttatggttgtaagtgctaaaattgaagaagaattatcaggtcttgatgatgaagaaaaagctgaaatgttaggtgaatatggtttggatgaatcaggattagataaattaattgaagctagctacaaattacttggccttatgagtttcttaacagccggagtacaagaagtaagagcttggacaatcaaaagaggaactaaagcaccagcagcggcaggtaagattcactctgatatcgaaagaggattcataagagcagaagtggtttcttataatgatttagttgaatgtggttcagaagctgcagctaaggaaaaaggtaagtttagactagaaggaaaagactatataatgcaagatggagatgttgttaattttagatttaatgtataattatctaaaaaataatgtttacagtgctaaaaaagagcaggattaagatcttgctcttttttagcaataaggaaagtataaaaagatttgggctgcaaatacaattgtttcagtgctttaagtagtatgagtgcatctaaatgccactaatgtgcttttttataagaaggattttaaggtacgaagggcttaaactagatagaatttgaattaaaattgtttaatattcaaaataaggatatgggaatatttaaaggcagaaaatttaattctatttatattgagaagtttaatctagaaatttactgatttaaaatgtaaaagttttaatatatttatgaatatatagttacaatttaatgaatgttagtcaaaaagtagatttttatatcaaagtttgttaaaatagaggacaagtatgaattgattataaaagtaaggtgtgatttattcgtgaagaaatcagttatagagtatataagcgattttaaaaatagcaaatattttacgtacataaatgatttgaaaaaaagtaagtattttaaatacataagcgacttcaagaaagacagatattttactccgcctgtaattatagtaatttgcctgagcgcggttatgataacgaatgtaatctctaaatctagaattgagtcatcaaaagataagcttactattgcagctaatagtgctgaagaggatttttataatgataagtatgatgctgcaattgaagaatataataagtatcaagaacaagaaaaagatgaatggccaatatggaatttaaaaattgcagaaatttattctgtaaaaggagattttgcagattcgaatgaacttcttacaaaagtttatttagctagaaataaaatagttgatggtaagaagcaaaaaaatatagataattttgagtctaaagatagagaacttacaaattatatagtgtttacgtcttttatgaacggagattatgataaggctttgcaatatggtgaattgtttttgatggattatccaacagataagaatttgttaaaaacaatgtttactatttatatggcaaatgacaagaaagataaaatgaaagaaataattgataattatccaagagatgatggaaatgcatcggatctggcagatttagctagaatgaatatgatgatgaataatttagatcaagggctgttattattaaaagatgcatggcataaagataaaaatgaagtcaaagtttttgatgtaataacgcaaattgcagaatataataagactgacattttaaataagatttcagcacttgagaaaaaagattcaggtgaacttgcatataagatgtggcaggcagagatttactctaaagataaagattctgctgaaaaggctaataatttaattagtgagttagaaggtaaagatgttggaagtataaatttggcacttattaaatctaacacatatcagaatttgggtgaatcagaaaaagcaagagatgttataaatgaaatgataaagagtgatccaaactcatttataggatatcacgcaatgtcattggaagattatagtgatgaaaattatgatgatgcacttaagaattgcgaaaagagtatatctctaaacaaagactatgcagataactatggattcttgatgccagagataatggaaaaacaagataagagtgaaaatgcagagccgtattttagaactgctttatataaggaaccttttaattataatatattaattaaattagcagagtattatggaaatacagttaaggatagttctagaggattatattattataccttagcatctaaaatgaatcctaatgatgcagaagtatattataatatggcattaattaaagtagcaaatcaaagacaagacgaagctatagatttattgaaaaagagtatagcaataaattcaaaagaaattaaatatcatagagcgctaggaactgtgtatttaaataaagaaaaaggtgaggatgctcttaaggaaataagagcggcatatgctattgataaaaatgatatactaacgctaaataatgctggatgttattatgtagctatagaaggagatttaagcagagggctagttaattttaaggcagcatatgatggcataaatgataaaacaagtgaagaggataaagatacaataagcgaaaattataatagagtaaggaatttatctgatgcatataataaaagaaacggggcaacattaaaaataccagatttaaaattattttattaagataattatttatataatataaacttggaaacaagtataaaatagtcatttgatagggggagagtagtatgtatccaattaagtttgaaaacctatattacgagagaatatggggtggaaagcacctagagaaatttagaaataatgttccagaaggtgtaataggagaaagttgggatatagcttgtcataaaaatgggactggtaaagtagaaaatggagaattaaaaggtaaaacgtttgatgaaataataaatctatatggagaaaaacttttaggtactgaaataagtactaaagaatttccacttttaattaaactaataacagcagaagataaactttcggtccaagtccatcctgatgatgagtatgcaaataaggttgaaaaagattctggaaaaacagaagcttggtatgtagttgatgcagaagagaatgcttcattaatagtgggaacaaaagattgcgataaggaaaaatttaagaaagcaatagaagaaggggaattagataagtacttaaataagattccagttaaaaagggcgactttttctttgtgcaaagtggattagttcatgctatatgtgaaggggtattaattgctgaaattcaacaaaatagtgatactacatatagagtttacgattataatagaggtcgtgaaattcatgtagaaaaggcattagatgtaatagatttttctcttaaaggggagaattcaaaagggattctaattgaaagagatggatatgataaatcatatctttgtttagatgaatattttacaatacaaaaatataaaattactacatctgtaaaagaaacgagtgatgagggaagattttatttatttacatgtgttgaaggtaatggtgtaattaaatatagtggtggagaagaaaaaatgcttatgggagatagtatcttcatcccagcaactcttggagattacgaattagttggtaattttacagtattaaagagctatgtaccaaacatagaaaatgaagaaaaaagcataatgagtgtaatagagaaataataataaagattaagggggaactattaagttgctccttaattgtttgactaacttgtaaaataagaatttgattaaggaatagtcattatatttatatattgaaataataaattatgtttagaatcttataagcattaaaattggacaaagtattatttatcttagaaatacagagcaaagtgaattttggtgagagtaaagagaaatatagtgaatttattaaaaaattaataattttttaatatgaaataagacctaataggtttaaaatatattaatatggttaaaaaagtaaataagtaaacaaaaaagaaagagagtgaaaattaagtgggattggatattttatttataatcaaagctataataatagcaatagttgaaggattaacagaatttattccggtgtcatcaactggacatatgatactggcgtcaagcatcattaattttaagggtgactttgttaaaatgtatgaggttgtaattcaattaggtgcaatattggccgttgttgttttatattggaagaagataaaaaacagcgtaattgaatttttcagatatatatttacaaaaggaaaagaaggtaaaacaggttttaactttggtataaatgtaatagtaggatgcataccaatgctgataataggattattattttataaaaagataaaaagtttatttaatcctgaagctgttgttataggatttatagttggaggtattctattaataataattgaaaacatgtttagaaaaagtaacaaacatgcaacaaagagtttagacagtataactccaatgcaagctctaaaggtaggagtattccaagtactttcagtatggccaggaatgtcaaggagtgcatcgactattatgggaggatggattgcaggcctttcaacaccaatagctgctgaattttcattctttttagctattccagctatgataggagcatctgcaaaagatcttatggaatttgactattcaggaatgaatttgacttcatggatttcattagtagtaggttttattgtggcatttgtagtatcagtcgttgttatggataaatttgtttcttatttgaagaaaagaccaatgcgtgtatttgcagtttatagaataggtgcaggtatagtatttggaatacttatgttctttggttttttaaatttcacattataaaaagaaagagttggattagctacacgctaattcaactttttttattcgaccgctaaatttttctcacatgcattcgaaaaggcagatgcgtgaaaagaatctctgtatccacagtagtctgcgatttttttataaaaaagaattaaaacaaataagtgtattcaaatagtaaatttatatttattatttgaatacgttaagagtttgatggggaataaaattcagaaacgcaattaagcatatatgttaaaaagaaacttaaataatgatagcacttaagattaattattataagaagttaattataacctaatagttaataatctacggaatttattaataaaaatagaaataacacttctaaatattaatttataaaatataatacttaatgtaagtttgggtatagtaattaatgtaggtaaaattcaaaatagtctttctttataataatttaggatcaaaattcctaggaataataatgaaaatttaagagaaacgactaaatattaaaattaaaaatttcaattcttatttaaagaatgaatatattgtaaattaatacttttcataaattaaagtttgtgatattattaagtaaatagtcagaaaataatgataatttaatcggaacaataatttccaatgaagattatggtatagggggattagaagatgtccaaagatattaaaaagatagctctattaactggaggaggagattgcccaggcttaaatgcagtaataagtgcagtaacgaaatcagcaattttaaattatggatatgaagttattggatataaattcggttacagaggattatataacaatgattttatttcattagatttaggagctgtatcaggccttatatcaagaggaggaacaattctttatagttcaaataaagataatttgtttgattactcagtagaagaaaatggtcaaatagtaaaaaaagatgtatccgatgtagcagttgagaatttaaaaaaagagggtgtagacgttttagttgtaattggtggagatggaacattaacatcagctagagatttttcaagaaaaggagtaaatgttattggcgttccaaagactatagataatgatttagggtcaactgatgtaacgtttggctttaatacagctataggtatagcaacggaagcattagatagactgcatacaactgcagaatctcatcatagaattatgattctagaagttatgggaaggaatgcaggttttatagcattggaatcaggaatagctggttcagcagatgttatactactacctgaaattccatatgatataaataaagttgtagaaaaaattgaagatagaaaaaaacatggaaagttattcactataattgttgtagcagaaggtgcaaaacctaagaacggcgatgttatagtatctaagatagttgaagatagtccagatccaattagacttggtggtattggaaataagatagctgaagatttggaaaagttagttaaggatagagaagttagatgtacagttcttggtcatattcaaagaggtggaactacatcaacatatgatagaatattatcaacaagatatggtgttgaagcaatagagcttatcaataaaggtaagttcggaagcatggtatgcttaaaaggtaatgaaattacttatgatagtttagaaaatgtcattggtaataacaagaaagtagatcaagatggagagttagtagctgtagctaagagaatagggatatcatttgccgattagttaacttaatatgagtaccaaattatactagtgatttagtactcataagatacctaatgacatttagtagtatttttagaaagcggtgggtattatgaaagaaataaaaagatatttagagtctagaataggaacatattcatttttctttgaggatttagaaagtggttttagttatggatacaatgaaaatgttcaaatgacaagtgcagggtgtatgaaattgccgatagcagtatctataataaagcatgttcaagaagggaacagtacatttttagataaaataaaaattgaagaagaagataaagtttatggaacaggaatactccatgaatttgataatagagaatatactatatttgaattgttagttgcaatgcttatacaaagtgataatacggcagcaaataagctcatagatatagttggtatagataagataaatgacgatatagaagcacaaggattgaaaaatactaaattaaatagaaaaacttcagatgaaagagctgtaagtaatggaattgaaaatataacaagcgctttagatctatcaaagatatggaaacacttatataattcaagctttttagatgagaaaaatagcaaaatgcttatggatatattacaaagacaacaaatgaaaaacaaattagcactttatatacctgatgatttaaaatatgaaatatcaagcaagacaggcgataaggctagcgttgaaaacgatacagctttgatccactcaccaaaaggatcttttacatttactgttctttcaatgggaattcctaatagtgtttacggaacagttacccttgctaaatgtggaaaaatgatgtgggataacataatgaacaacttttagagacatagttaataactcctagaaaactaggagttatttttataacctaattaaaatttaaactaatttatctgaaatttatataaaataatttttattgacacaacctcaaagaaatggtattcttacacaaagaataacctttaatttgattcagagagatcaataaggaagttatataataccaatgatctaggattattatgccttcctttattttaaggaaggttttttattatatagtattatataatttttccctttaaattaacacagagaggttaagaaggagtgataataaaatgataaaagatattaaacatctaatagagcctatggattttacggtagaggaattagatgaaatattcaatttagcacatcaaataatcgcacatccaaaggaattttctcatatttgtgacgggaaaattttagctacattattttatgaaccaagtacgagaacaagattgagctttgaagctgcaatgatgagacttggtggtaaaattctcggattttcagagccgaattcaacatcaatttctaaaggagaaactttagctgatacaattaaaatggtatcaatatattcagatataataacaatgagacatccaaaagaaggtgcagcaaaagttgcaagtatctattctaacgttccaataattaatgctggtgatggtggacatcaacatccaactcaaaccctagcagatttacttacgattacaagcttaaaaaatgggttaaacaatcatagaatcggaatttgtggtgatttaaaatttggaagaactgtacattcgttaataaaagcaatgtccagataccaaaataataagtttgtattaatatctccaaaagaacttgctataccacaatatataagagaagaagttttagcgaaaaatcacattgaatatatagaggtagaaaaattagaagatgtaattgaaagtcttgatatcttatatatgacaagagttcaaaaggaaagattctttaatgaagaagagtatttaagattaagagatagttatatattagacagagcgaaaatggatctggctaaagacgatatgatagtaatgcacccgctgccaagagtaaatgaaattgcttatgaggtagatgaagatagaagagcttcatactttaagcaagctgaatacggaatgtatgtaagaatggcgttaatgattaagcttttgggggtgatgtaagatgcttgaaataacaagtattaagaatggaatagtaattgaccatatccaagcaggagtgggagttaagatatttaagtacttaaaactagacactaatgattgcagtgttgctttgataattaatgcggatagtaagaagcttggaaagaaagatataattaagatagaaaactgctttgaacttgactatactgttttaggattactctcacctacaataacaatttgtgaagtgaaagatgaaatgataataaataaagttacgccaacgctacctgataaagtggaaaatataattaagtgtaagaatccaagctgcataactagccaggaagaatatgtacctcattcttttattttagtagataaagagaatggaagatatagatgtgaatattgcgatgagataacaaagctttcagaaatttagaagaattaagaggtgttatatggaactgttaattaaaaacgcgaggatagtagatgtaacccaagattttataggcgacatctatattaaggacggaataattgaagaaatagggcaaaagatctttaagatagatgtagaaactattgagtgtgaaggaaagattttaatgccatcatttatagatacacatgcacattttagagatccaggtcttacatggaaagaagatattgaaacaggatctagagcagcgctaaaaggtggttacacaggagtttgtcttatggcaaatacaaaccctatatgttcatcaaaaaaggttctagaatacgtaagaaataaatctaaagaaattaatttaatagatattcatcaatgtttatcagtaacaaaggattttgatggagtgacattaactcatttagaagagcttttaggtgataaggaaattaaagcaatttcagatgatggagttgggatatcaaactccaatacaatgcttgaagccatggaagttgcgaagaagaataactgggttataatgtctcatgctgaaagtcctgaattctccaaagtagatatgaggatagctgagaatatgatgacaataagagatgtagaattagctaaactaagtaaagctagattacacatgtgccatgtcagcacaaaggaagctataaaatgtataattgatggaaaagtgagtggcgcaaatataacactagaggttactcctcatcatattggtctaacaagagatataaatgattatagagtaaatcctccaattagagaaaaagaggatgtagaggcaataataaatgccataaaattgggtatggttgatacaataggaacggatcatgctccacatacagcggatgagaagatgaaaggttcgcctggaatggttggaatagagaccgcattttcaatatgttatacgaaattagtgaaagagaacaatgtttcactaaataaattaagtgagcttatgtcatataatcctgcaaagctcctaggaatgaataaaggaaaaattagcatcggagtcgaaggggatttagttttagttgatattaataaatgcctaaaagtgaatccagaagaatttgcatcaaagggacggaatacgccatttacaggtatggaattctacggtgaaattcttatgacaataaagggtggagaaattaagtatacacatatgaaatgtgcgcgaagcgcaatagggaacatttcacattagaaaaaggcgcgaagcgcgacaaaaaacatttcacgttagaaaaagcgcgaagcgcaattaagaacagttcacattagaaaaagagtgcagcacaaaagagaacatttcgtattaaaaaagcacacacatatgaaatatgagagaatcgtaataaagaatttttgggtgaattaagaacatttcatatcaaaaaagcgtatagctagatagagaatttttaggcgcaactatgattataaattaggaagcggacacgtgtaaaataagagtggcttaaataatatcataagtagaaaatggagaacataattaagaaaattataagatatgagttcctaaaggaattaattgtgaattctgactgtggactaaatagggttggagggagatctgaaatgacaaattacataattgataaattatacaatagggttgaagaaagaggagtagtttgtgtagggttggatactgcattaagctatattccagatcatataaaagaaggtagaactgacagtgaagctatctttgaattcaataaacaaataatagatgcgacttgggatgtatcagcatgctttaaggtgcagattgcttactatgaagctttaggacttgaaggattaattgcttacaagaaaactctagactatttaagagataaaggtgaaattatcatagcggatattaaaagaggagatatagcagctacagcaaccatgtatgcaaaggctcattttgatggggattttgaagctgattttataacacttagtccatatatgggaatggatagtattgaaccatatctaccttatttagaaaagggaagtaaaggtgtgtttagcttagttagaacttcaaatccaggtgcagaagatattgagtatctagatactactggagataagaaagtttacgaagttgtagcagataaaattactgaaatgggaaaaaattatactggaagttgtggatatacagcaattggcggtgttataggatgtactcatgttgaagaaggaaagaaaataagatcaaactatagcaatatgtttttcttaatacctggatatggtgcacaaggcgggaaagctgaagatgttgcactatatttaaacaatggaaatggtggggttgtaaattcttcaagaggaatactccttgcttacaaaaaagaaaatagagaaaaagagtttgctttatgtgctagagaagaagccataaagatgagagatgcaataagagaagcagtgaagaacatataaattttacattaaagataacttaaggaggcagggttatggctataacttacagaaatgcaaaagtagtttcaaataaagagatctcaaaagatatatataaattagtagttgaagatgatgcagaaataaaggcaggacaattttatatgttaaagctaaatggtgcaacatttctgccaaggccaataagtatatgcgaaaaatctaagaataaactaacatttttatatgctgtagtaggaaacggaactaaagaatttactaagcttaaagaagatgatgaaataagcttaacagggcctcttggaaatgggtttgatttagagaaagaatataacaaggtagcactagtttcagggggaattggaacagcaccaatgcttgaactagcaaagaaattaagaaagaaaaatccagatcaaaagatagatctctatgcaggattcagacatgatgtttacttaatagatgagttaaaagaatatgtaaatgaagtttatatatctacaaacactggaaagaatggtcataaaggatttgttactgaaattttaaaaccagaagattacgatacagtgttatgctgcggaccagaaattatgatgaaaaaagttgtagatatgtgtaaagaaaagaatgttgctgtatatgtatctatggaaaagcatatggcatgtggagtgggtgcatgtttagtatgtacttgtaaaacaaaagatggacataagagaacgtgtaaagatggtccaatatttgatggatactatgttgaattataataaccaaaggagaagaagaatatgatgaaagtaactattaataatgtagaatttaaaaatcctgtaatagcagcatcgggaacctttggttttggtgaggaatttaataatttttatgatgttggaattcttggcggaatatcttcaaaagggcttacaataaaccccaagcaaggtaatgaagggataagagtatatgaaacaccatcaggaatgatgaattcagtaggattacaaaatccaggaatagatgcatttatagaaaatgagcttgcgaaaatgagaaagtacggaactaatgttatagcaaatattgggggaggatgcttggaagactatgaagctgctgtaagtaaaattgatagcagtaatgttgacatgattgaacttaatatttcttgcccaaatgtaaaacatggtggtatggcttttgggattaagtcaaaagtagcatatgatgtggttagagaaattaaagccatgactaagaagccgttgatggttaaattatctcctaatgcagaagatatagtagatatggctgtaaagtgccaggaagcaggagcggactctatatcattaataaataccttaaaagggatggctatagatgtatataaaagaaggccggtatttaataatataactgcaggtctttcagggccggctgtaaaaccaattgctcttagaatggtttatgaagtggctaaggctgtagatattccagtaataggacttggaggaatatcaagtggtaaagatgccgtagaatttatgatggcaggagctagcgcagtacagataggaacgattaattttgtaaatcctatggctgggaaagaaatagttgaagaaatggaaagttttttgaaggaacaaggaattaaggatattaacgagattataggaataatataaattgatcatagatcctaattcctaataatgaaaataagcaactgataagtgaatattaataattacaaagtagatattggaggaattttaaatgaaggcatataagaaagaatttatcaattttatgatagaatgtggagtacttacatttggagattttgttactaagagtggaagaaagactccgttctttgttaatacaggtaactatcaaacaggaagccagttaagaagacttggagaattttatgcagaggcaataaaagaaaactttgcagatgattatgatgtattatttgggcctgcatacaaaggaattcctctaagcgttacaacatctattgctttgtctagctcatttgatattgatgtaagatattgttcaaatagaaaagaagtaaaagatcatggagatacaggaattcttttaggaagtaaactaaatgatggagataaagtactaatagttgaagatgttacaacagcaggaacatcaatttacgaaactatgcctatcttaaaaagccaagcagatgttaatgttaaaggtcttataatatcggtagatagaatggaaagagggcaaggtgaacaatcagccttaactgaaatcagagaaaaattcggatttaaaacttgtgccatagttacaatggcggaagttatagaatatttatacaataaagagattaacggaactatacttataacagacgaagttaaaggtagaattgacgaatattacaaacaatatggtgcaaaataaaagtattaagaacaactcaacgtgaagcaatgaacaaccgaaagagaatacatatatgtttctcaggactgtgaaaaatttcgcttagcatatctaaacgcgaagttgcacccaagtctgcatgctcctgcgacaagcccatgacaagcagacttggaacaacttcccgttaatatatgcagcagcttatttttcaatgcctgttccgcatatatgtattctctttctttgttttattatcactttagttcttttagtaacacttaatatagaaaaagagaatatatattttataaaaagttacaatatagttaaaataaaggtattgtaacaacagaaatataaaaatacttgcctaaatatgctttactttaaatttaagataaacaaagaaatgaaatatatgtttttgaggagtgttcataagaagattttgctggaagtaattcttagaatataagttgttccaaatgtgctagttcaaagcgtagcctttgaagcaagcactttgggtgcaacttatattgtttgaattacccagtaaaatcttcagagaaccggagcaaacacatatattccatttcggttgtttagcaggaaatttaaatgttcataagactgcaagtgtttttatatttcggttattcattgcgttacattaagttgtgatcaaatacatttacaaggagggtttatgaatattttaattactaacgacgatggaataaatgcaccaggaataattgctttagcaaaggaaatttctaaggagcataaggttacaattgttgcgcccaaggatcaaaaaagtgcgtctagtcattcaatatctattcatagtccgattaaaattaaagaagaattcattgaaggcttagattgtaaggcttatagtgtttcaggaacgcctgctgattgtactcaagttgggttatcctttttgaaagagaatatagagcttgtaatatctggcataaataaaggacctaatgtagggactgatattttatactcaggtacggtatcggcagcaatagaaggaaccatatacggaattccgtcaattgcagtttcaatggatgttgaatatgggaaagatgatgaggattattctaaggctgttaaatgggcgataaaagttttagatatagcaaaggaagaatatttaaaaagtgatgtggtattaaatcttaacattccaaattttaatgaaagagatataaagggcatcaaagtctgtaagattggaaggtccacatataaaacagaatatatacttttagaaagtaatgaagaaggtgacttgtatacaacaaaaggaacaagaaatgctataaaggaagaagaaagtgatttatattatctatatcaaggatatgttacattaacaccgcttcattttgattttactgattttgcaatattaagtgatgttacgaaaatatttgaaaaataaaggcttgtcatgtgaatggcaagccttccttattacttgtttataagttcatcaatatgaacggtagtataatcattatctttaaatgcttttactatttgttgcaaaggtgaacgtgcatcataattcacgttaagtttgtttccatttaggttaaagtttatataatctatttctatagatggatgataataaaagctattaagcgtatcagcatctccttcattaatcgtatttaccatacgagtcgtatctgttgatggatcagctatacggcctaatggagttggaacaaataagtgagagtcatctggcttataaatgttactttttgtataatcatatggctcgtatatgaactgaaaatattcactaattattttcttttgttgctcagtatctctgtaatgaggactttcgtaatacgagataggaatgttcagagcacttgcagtatctatacctttttctattactgctctagtctcagcttctgtactatttacgtctttagacatttcttcaccagttccgcttgagtcattaccagattgatgagtatatccgtgtaaacctatttctccacctttattaagagcataatctaatacatctacaaatcctacatttacaatgttatcattcgtcaacaaatcattatcaaaatttgctgaaggaactacaaatctaggtatccatgaaatatgaaatttcagtccttgggaaaatagcaaattagccattatctttatttttgtttgatttttatctacaacatttgtataaccgcaaccaaaatcttcaaaacgtattaaaccaattttatcgctatatagtatagctgaatcttctggttcctttacatcgttaggtattaggtttatttttttgttctgaaagtcaaatacagcaaataaatcaaaaatttcttctatatctgaaattgaaatataatagctaccattattgttaagtaaattaccacgaagattaccttttctagaattcttttcataagtggtttcatttaagaaaattttattactatcattatatattgatatggaattattagaagtatctaaagtataattgagtttactgcaaataaaagttagaggtatataatacctttgggcttttagcagtattggaacattagttagatttcctgtattcaaaatatttagggttacatcatttacttttgttacaggcttgtccgaaaatttgattttgggtgtatatgtacttttaaatttttcctctggtagcatacttgagtataatgttttattaataatagttagattctttctaaaaaaattaaaataagaaagaacttgatataatataaagacagatagagctattgctaaaaaagaaaataaagatagtttagcattcctttgcatatgttttctcccctttgaattatgtataaacaatattgtaacaaaattatatcattattttgtgtcaattattttgtacaaatgttaaatttatgttataaattctaaaaaaagttgacaaagaaaactttttggtatagttttataaacttatgaatctaaaatatgaaattcaaaaatggattttaaaagattgaagaatatttaaaaattataaatgtaaataacattatgtttaaaacgttttctgataatactaatatgtcaatataaattaatttatacactgaaagaaaaatattataaatttaagaaatggtaaaggttataatatttgcagttagtaatctagagataaataaatcaagttattgatttatttattaataatattttttataaattaaagataatatcttaattagcaataagtgacaagttaaggggaaaatttatttcgcgaacttatagaaatattatcttatgaaagtctgatagatttattaacaaaaaagtgaaactaattactaactgataaaagatatcattgacatgcatttaattaaagtatacaataatggtatgaattaattgattaaaaattaacaaagtttttaatcaaaagtataaaggaggaaaactaatgtttaaacaatgggatggatttaaaaacggaacatggcaagagagtattgacgtaagaaactttatacaaaaaaattataagttatatgaaggagattcaactttcctagaagataaaactgaaaaaacaagtaaagtatgggcgagagcttatgaattaatagtagaagaagttaaaaaaggaattatagatgtagcgaatgatagagtatcaggaatagataactatgaacctggatatatagataaagataacgaagttatagttgggcttcaaacagatgcaccacttaagagaatagtaaatccatttggtggaatgagaatggttcaaagctctttaaaagaatatggatatgagttagataaaaatatcgaagaatattttcctaagtacagaaagactcacaacgaaggtgtatttgatgcgtatacaaaagaaataagagcagcaagaagtgcgggattattaacaggtcttcccgatgcttatggtagaggaagaataattggcgattatagaagagtagctctttatggtatagattacctaatagaagaaaagaaaagggatcttgataatctaaatggtgatatgcttgatgagttagtaagaaaaagagaagaagtttcaatgcagatcagagctttaggcgaagtaaaatcaatggcatcaaaatatggaattgatatatctaagccagcatcaaatgcaagagaagcagcacaacacttatattttggatacttagcaggaattaaggaaaacaatggagctgcaacatcatttggaagaacttcaaccttcttagatatttatattgaaagagatctagaagcaggattaattacagaaaaagaagctcaagaaattgttgaccaactaattataaagttaagattagttagacacttaaggactccagaatataatgaattatttggtggggatccaacttgggtaactgaatcaattggtggtgtaggtattaatggtaagccgcttgtaactaagaattcatttagatatcttcatactttaataaatttaggaacatcagcagaaccaaacttaacagttttatggtcagataagcttccagaaagctttaagaaatattgtgcagaaatctcaataaaaacagactctattcaatatgaaaatgatgaagttatgagaccggtttatggtgatgattatgcaatagcttgctgcgtatcagctatgaaggttggtaaacaaatgcaattctttggagctagagcaaatatagctaaatcgcttttatatgctataaatggtggagtcgatgaattaaaaggtattaaagtagtaccaggaattgaaaaacttacagacgaagaaattcttgattttaataaagtaaagtcaaattacttcaaagtattagaatatgtagcaaaagtttatgtagatacaatgaacataattcactttatgcatgataaatatgcttatgaagcaggccaaatggcactacatgatacagcagtagaaagattaatggcatttggtattgcaggactttcagtagcaatagattcattatcggctgtaaaatatgcaaaagttaaaccaattagaaatgaagaaggtataactgtagattttgaagttgaaggagatttccctaaatacggaaatgatgatgacagagcagatgatctaggcgtagaattagtaactaaattctcaaatgagcttaagaaacatccactatacagagatgcaaaacatacattatcagcgctaacaatcacatcaaatgtaatgtatggtaagaaaacagggacaactccagatggtagaaagaaaggcgaaccacttgctccgggagcaaatccaatgcatggaagagatattaatggagcattagcatcacttaactcagtagctaaaataccatataatgaaatttgtcaagatggagtatctaatacattctcaatagttccagatgcacttggaaaagatgagaatcaaaagataactaacctagttgcaatattagatggatatttcactcaaggagctcatcacttaaatgttaatgttcttaatagacaaacattgatagatgctatggaaaatccagataaatacccaacacttacaataagagtttcagggtatgctgttaacttcagtagattatcaaaagaacaacaattagaagttataagcagaacattccatgagagcatctaatgagaagtagaataatgtatattatttaaggattactataaaataaaaaaattttggaggaaggggaaggtgaactttcccttcttttgccttatgatgaagaaacaatagagttagataatattaagtaatgatatagtgtaccatatacaattggcttaaatattaatagcttatttaagggaataataaattaatatatattctaaaagtgttaattcaataagcgttctcttaaaatactagataatgtccccaaataattttatagaggatgaattatattatttagaacttatgtatattaatttgaagtataataaagtatagggggtgtaacaaatggtaaaaggtaatgttcattcaatagagagcatgggtcttgtggacggaccaggaattagagtagtagtgtttttgcaaggttgtgcgttaagatgtaagtattgtcataatcctgatacttgggctactaatggtggagaggaatatactccagaacagctagttaataagattgaaagatttaaaacttattttgcaagtagtggaggaggagtcacattctcaggtggagagcctttaaggcagccagaatttctactagaaactcttaaactatgcaaaagtaaaggaattaatacttgtattgatacagcaggttatggatttggtgattatgatgaaatattaaaatatacagatttagttttatttgatataaaacattttacaccagaaggatacaaaaatataactttaatgaatatagatgaatccttgaaattcttagaagcgatgaagagaaataatacaaagatgtggataaggcatgttgtggttccaggattaacagatgatgtagaacatttaaaggaacttaaaaaatacattgacgagatacctaatgttgagaaagtagaattacttccatatcatttattaggtacaaataagtatgaaggactagggattaaatatcctcttgaaaatgtaaaagctatggataaagaattaattaaaaaataccagaaagagatatttggagattattcttatggcaaataagatgggttcaatgggaattttaaatttagcattaagattaacttaaggcatatgaaataaaataacaagtccaaaatgctatgattattttttagtaggcaaataagcagagtgggtttatagcgagcctattagtgaaatctgctgatgaagcaaaatggaaaatatgttttacagatgggctcgttatttcttcattatgcctaatactaataagtgtaaaattattcttattgacaaactaaatggtttggtattattcttatattagatattagtcatatgactgacggaagtggagttaccacatgaagtatgactaggcatattatcttatatgccacaaaaagccgaccgtctgggcaaaaaaagcctggattgcgtcggcttttttatatggaaaaaattatataattaaattattttagggaggaaaaattatgtttaaacaatgggaaggattcaaaaacggaacatggcaagaggatattgatgtaagaaactttatacaaaaaaattataaattatacgagggtgatggaagtttcttagaagagaaaacagaaaggacaagcaaagtctggggcaaagcttatgccttaatagttgaggaagtaaaaaagggaataattgatgttgctacagatagagtatcagggatagataattatgatcctgggtatatagatagagataacgaagttatagttgggcttcaaacagatgcaccacttaagagaatagtaaatccatttggtggaatgagaatggttcaaagttcattaaaggaatatggatatgaacttgatccggaaattaataagaatttttcaaaatacagaaagactcacaacgaaggtgtttttgatgcgtatacaaaagaaataagagcagcgagaagtgctggattattaacaggcctaccagatgcatacggtagaggaagaataataggtgattatagaagagtagctctttatggtatagattacttaatagaagaaaagaaaaaggatcttgataatctaaacggtgatatgcttgatgagttagtaagaaaaagagaagaagtttcaatgcagattagagctttaggtgaagtaaaatcaatggcagcaaaatatggaattgatatatctaagccagcatcaaatgcaaaagaagcagcacaacatttatactttggatacttagcaggaattaaggaaaacaatggagctgcaacatcatttggaagaacttcaaccttcttagatatatatattgaaagagatttagaagcaggattaattacagaaaaagaagcccaagaaattgttgaccaactaattataaagttaagattagttagacacttaagaactccagaatataatgaattatttggtggggacccaacttgggtaactgaatcaattggtggtgtaggtattaatggtaagccgcttgtaactaagaattcatttagatatcttcatactttaataaatttaggaacatcagcagaaccaaacttaacagttttatggtcagataagcttccagaaagctttaagaaatattgtgcagaaatctcaataaaaacagactctattcaatatgaaaatgatgaagttatgagaccggtttatggtgatgattatgcaatagcttgctgcgtatcagctatgaaggttggtaaacaaatgcaattctttggagctagagcaaatatagctaaatcgcttttatatgctataaatggtggagtagatgagttaaaaggtattaaggtagtaccaggaattgaaaagtttacagacgaagaaattcttaattttgataaagtaaaggcaaattacttcaaagtattagaatatgtagcaaaagtgtatgtggatacaatgaacataattcactttatgcatgataaatatgcttatgaagcaagtcaaatggctcttcatgatacagcagtagaaagattaatggcgtttggtattgcaggtctttcagtagctatagattcattgtcagctataaaatatgcaaaagttagaccaattagaaatgaagaaggtataactatagattttgaagttgaaggagatttccctaaatacggaaatgatgatgacagagcagatgatttaggagtagaattagtaactaaattctctggagagcttaagaagcatccactatacagagatgcaaaacatacattatcagcgctaacaatcacatcaaatgtaatgtatggtaagaaaacaggaacaacaccggatggaagaaagaaaggtgaaccattagcgccaggagcaaacccaatgcatggaagagatattaatggagcattagcatcacttaactcagtagctaaaataccatataatgaaatttgccaagatggtgtatctaatacattctcaatagttccagatgcacttggaaaaaatgaagatcaaaagataactaacctagttgcaatattagatggatattttactcaaggggctcatcacttaaatgttaatgttcttaatagacaaacattaatagatgcaatggaaaatccagataagtatccaacacttacaatcagagtatcaggatatgcggttaactttagcagattatcaaaagaacaacagttagaagttataagcagaacattccatgaaagtatttagtaaaataaaattattctgtttatagtaaagtttttgaggaatttgaatgtactaaaattttaagaaaatataaatggcttgaagataataaattaattacaaatatagaaagactataggacataatattccagtccatatagtctttttgatttcatatgaaaatattaatttaaattgtctttaagtatactaatttttacgagatgagttaaatataatttttataatgtgttattctagtacagaaaaattatctttgttaaaagcgcaaatgggacatacccaataatcaggcaaatcattaaaatctacatgtggagcaattccaccatcaggatctccaagttctggatcataaatatatccgcatacttcacaaacatattttttcattttatcacctcatttataaattaaacaagacaagaataaattttaaaactgtctaaatctaaaattctagataccataaagaatagatagagtaaaaaccacaagttatagtatattatatgatatttttattgaggtgttaattaataaaaattatattttattttaaaccgtttgagttcctagctagaagatttgaaaaatacccttttggaaagtggcctttctttaatccttcgataacagttaaatatgttgcagctgtatcaaatctggcatcatggtaatttccactaccttcaaataatttttcagatgtctcaacaatttgattgcttgatatatttaaccaatctatcacttctgataattttggatttttgatttctccattggcttttggaatcttacatatatctctatagtaagccatagtgcagaaaacatttttggggtaaaaatcctctcctaaagataatagttcatgttttaaaaatctaacatcaaaattaacattatgaccgattagaaaatcagcagtcataaaatcctcaagaaattcaggtactaaatcctcaaaatattgcccatcagataattcataaagcttctctaaagaaaaaccatgaatttctttggcagaagggtccatctcatcgactgtaaaaaagaagtttttaccagtagttatctgaggttttgtactagcatcaacagttatgtaacttaactgacatatgctgccgggttttatactagtggtttctgtatcaaaaaataataatttcattaaagtgtacctccatcttctgcgtaaaacatttaaaaataattacgtctatatgcttactaataaattcattattaagttgctaaatttaattatatagtatttacgaaaaaattcaaataaggtataatcagataagaatgattattaattaataaaattgttggataataaattcataataattataagatgaaagttgttatgagcaaataataaatttgttatctggaaagaatagaattaatattgtataaattaggaggaatatataatggtagaaagaaaacgtaaaatatctgtgattggtgcaggttttgtaggtgcaacaacagcatatgcattaatgaatagtggagtagctacagaaatatgtttatttgatataaatatggataaagcaatgggagaagttatggatttagttcatggtacttcttttgtaaagcctgttagcatttatgcaggaagtattgaagaaactagagattcagatatagttataattacagctggtgcagctcaaaaagaaggggaaactagactagatcttattgaaaaaaattacaatatatttaagagctttgttccacaaatagcagcagcaagcccagatgctattttgttagtagtatcaaatccatgtgatgtgcttgcatatataacttacaagttatctggattccctagggaaagagtaatagcatcaggaactgtattagatacgtcgagattaaaatacgttattggtaaatactttaatgtaaataataataatatccatgcatatgttttaggagaacatggcgatagcgaagttgttagctggagtactgcaagtatagctggagaaacttttgaagaatatgctaaaaagttcaatttagagtgggatgatgatgtaaaatcagtaatagaaagcgatgttaaaaatgcagcttatgaaataataagtaggaaaaatgctacttattttgctgtagcattagcagtaaatacaatagtagaagctatattaagagacgaaaatactattttaactgtatcatgtttgatgcagggagagtatgggatagaaaatgtttacttagcagtcccaacaattttaaatagtaagggtgttgtgagaattgtaaaccccgttctaaatgatgaagaattgaaaaaattaaaagaatcagcaactgttctaaaaggacacattgaaaaagttgttaataaataactagaattaactaaatgtattgtgtactaaacaaaatataaaaatacttgcagtatgagtagggtctaagtttactgctgaactctcgaaagagaatatatgcgtttgttctggttctctgaagattttgccgggtgattctaagaatagaagttgtgcccaaaatgctagcctcaaaagcaagttttgaactagcatatttggaacaacttctaatctaagaagcacagccagcaagatcttctaatgaacactgcacaaaagcagatattctctttctttatttagtagtaaacctaaatcaaattcatatttatggaagtatttttatatttctgcatttagcaatatccatctaataattgacttaaatattttagagtctatattgattcctaagtttttctcacatatatttgaaaaagtagctggtaaaagataccactacacattcgtctgtgactttttcttataactatcatcataaatttataatatttgaaatactcaaaatgatggcaaaacaaagaaagagaatacatatatgtgaagcaggcattgaaaaataagttgcttatatcttaatgggaagttgttccatttttgcttgtcctgcgcgcttgtcgcaggagcatgaagaaatggtggaactttctatttagatatatccaacgaaatttttctagtcatgtggaacatatatgtattctctttcgattgcttatctcatcattttgagtgtttcgcaatactgttttttagttcattccattaaaactaatctctccagtaattacagctttttcatttccgttgctatctatgaccataaggtcgccgttatcagaaacagaaacacaggtaacaatttcttcattattatatgtgattaattttgcctttcgacctaaaatgttggaatgatttcggcagattgagattgtctcggaaagatctaatttatttatgaagttattgtataatacttcgaaattatttaagaaagctgaaagtatctcacttcttttgaaatctttatcatattcaatctttagtgaagtggcaattgcttttatattatcatcaaagtcactttcatctatattaatattcatccctactcccaaaactagataatgaacactatccatgtcacatttcatttcagctaggattccacaaaactttttgtcattcaaaagtatatcattaggccatttaatggttgaattaatacctaaattacttagtgtcttatatacagaagcagcagcaatttgagttattttaggagcttccgttggaggaagtttaggtcttaatattaatgaaaaccaaagaccgccatttggagaaacccatttcctattgaagcgaccacttcctaaagtttgcttttctgcaattactatagtaccgtgttcgatttctttctgtgcaagctcttttgctttaatatttgtagaatctattttatcaaagtaaactatgctttttccaatagcagatgtttttaataaaggtagaatttcatttttatttaataaatcaggagaattaagtaatttgtatcccttattagaaattccttctattatatagccttttaattttaagttttttatatgtttccatatagcagttcgtgaaacatttaaagtagaacttaggtattcgccagaaacataatcttgagatttttttaattcatttaaaattttatcttccatttatatatacctcctaagactaattataacataatgtgagtatttaaaagcaaaatccaagtaccaaatagaataaaatgctggaaaaatgaaattattgtaatctaattgaaaatattatataattaggtctggtgtaatttttataaatgcaactaaaatgcatttttagagaggataataaaatggatataaatagaaaaaataagaatataaataagaaatctaaggtaaaaaaaagcaagaaaagagtaaataagatttcatttaagacattagctatattttttgcatttgaattattttttactggatgtacattcccatttttacttttatatggaccatttgataatgcgaaaagccaatatgttggagcagcaatgacttcaatgagtcatcaatatctggctacatggttcttatcagataaaaaaatagctgaaattatgggagaaaactcaactgaggaaactagtgaaactaccaatatatctgatattaaagttccaaaggttaaagatgatactatagaacttcatgatatagaaaattctaagtataatggttattatttggtggtaaaagacccaacaagagttaaaattggagtaagttctaaattgggagttgaaggtgaaactacatcaacaattgctgaaaacaatgatgctatagctgccattaatggtggagcatttacagatcaatcatctgccgctcaatggacaggaaatggtggattggcatcagggattgtaatgactggtggtgaagtgaaagttaatgatgtaggagataacccaacaacaacctttgggatagataaaaatggagtaatggttgtaggtgattatacagtagaaaaacttaaagaacttggaattcaggaagctttaagttttggtccggcattaataattaatggaaatatggtaaagataaacggtgatggaggatttgggacagcccctaaaactgctataggacaaatgaaggatggctcaataattctcctagttatagatggtagagaaattggaagtataggagcaacattaaaggaattacaagagattatgcatcagctaggtgcatggaatgcaatgaatttagatggtggaaaatcgacaacattgtattactatggagaagttagaaataaaccatcaaatagtatgggagaaagaactattccaacagcagttattgttaaataaacagaaggtgaggtagaattatgaagatgtttaagaagataactgcgtgggcattgttatctatactattacaaatttctggcttatatattttagaaaattttatttttaaacatacgtcagaatttaaaagtaataaaatagaagttcaaaaaaaggataatacaaaagatatttcagcatctatcccgggtaatgcaaaagatactaaaatatcagatgacggtaaatacatatgttatcaggatggcgaaagtgtgtatttggaagacaccaagacgggcacaagcaatccaattacaacagaaaaaaagggcacaattatgtattatgattggcttttagaaagagatatactagtaatagctcagaagattgaaaaagatggagaatctaaagttcagcttataacatataatgctaaagatttaacagaaacagttgcaagtaaagaagatatttgcacataccaagagggtatggaagttaagaagataaccacttctgtctttacaggtgtattttatgtagaaatatatacaggtggtttaaagagcacagtttatagatttgatagagattatgaaagaaaaaaggttcctctagcagttaatgttttaggaaatatgaaagtaatgcctcacaacgatagattaatatatgaagataagttgaatagtaaattttttgttacgagccctaataagcaattaacatttagtggtaataaaaatctgacgcttcttggaatcgacagaaatgatgtgatttatattggtgagcttaacggtgataaaattaccagtatcacttatggaaaagttgatgaagatacagcaaattggaaaaaggcaacacttgattcggttgtaagtgctaatgacttgtattttagtaataaaagtgaaatactagtcaatgataatcttaaaggtagtgttaagaatttaagtacaggaaaagaagttgaatatgaaggaaaacttgttcagattaaagaagatttcatagcgactgaagataatagcggaaaattagtttataaaagtttaaataatagtaaataaagatggtaaataaagagtgtttaattaaattgaaattaaacactctttattaaattagatcttataatgtatatgttgtaactgagtttctaccttttgtcttaattgagcatttgttttactaaaattttaaatgtaggtttattagtacaacatatagaacaatgttctgatataaactaataagtgcatttacattgttgatagtaatcttttatgatataatgttgggaataaatagtaagcaatatatacattttatataaacatttaagacactataatagcctaaggaagataaaaaatatatatacctaaaaagtttaatttataaaaatttatcttaaattattaggtggcaaaaatgaataagtctataagaacagagtaatattatttagttgaaatatatatgttcttttaataggatttgttctaagtatgatataatataaaacatacatatcgaaaaaggaggaaaacatgaattcagtacttaatatgattttaatgattccagggatgcttatcgcttttacatttcatgaatatgcacatgcattaatagcagatagaatgggagataagacaccaaggtttcaaggaagattgactttaaatccaattgcgcatattgatcctataggatttgtggctgtacttatctttagctttggatgggcaaagccagtacaaactaatccatcggcatataaaaactattataaagatgacttgaaagtaagtttagctggaccaattgcaaattttttagttgccatagcaacttcaatagttttgggactttattatagttttgcatatagatttttaccagatgcattagctggtgttttagagcgaatgatatatatgacgcttgttattaatgtaaatataggattatttaatttgataccaataccaggactagatggctttagtcttttaagagatttaagtccaaatacgttctatagatttgaagaaaaattttatcaatatcaaatgttcattatgttagcgttaatctttgttggaggaagaataatttctataccagccggcgttatacgtaatatgcttttagggattactaatttaataacacgtttcctattttaaaaataaagttgacaaaatttaagataatttgtataatttattatcattaatattgaaaaattctaagaagaggaaagtaatttaattaattcctttagcgaatagggagatggtgtaagccctatggatagattaagtgaaaagagccttggagaaatcacctgaaataagtagttaaaaagataataatctaatatagctggtatgatatattaattattatttttaaacctttagtagggctggtcgcaagttaaattgcgttaaaagttgagaggtattttatttatataaaatacaataagagtggtaccgcggataattcgtctctttttatttaagaggcggattttttttgttctttaggaatctatatcgaagttaaatttatgcatttattatgagaaatactgactaagaaaattaaattttgagaaagaataaagaaatacattcttacaaattataaagttatttaatttatgaagagtttgtctaaatataaggaggatattatggattataaaagtaaagttgcagaattaataaaaaaacatgtggaattagaaattgaagctattgaaaaattgattgaaataccgccaaagccagaaatgggagattatgcatttccatgtttccaattgtcaaaggttatgagaaaagctccaaatatgatagcagaagaattgaagaattctatgtcaactgatggatttgaaagaattgagaatttagggccatatgttaacttcttcgttgataaaggagtatttgcagaaaatacaatcaaaaaggctttagaagatggagaaaattatggagcatcaaatataggagaagggaaaacagtttgcgttgaatattcttcacctaatatagcaaagcctttccatgttggtcacttattcactacagctataggtaattctttatataagatgtttaaaaaggaaggctataatactgtaggattgaatcacttaggagattggggaactcaatttggtaagcttataagcgcgtatgatagatgggtagacgaagaggcattagaaaaggctccaattgatgaattacttagaatatatgttaaattccacgaagaggctgaaaaggatccttcattagaagatgaagcaagagcaaactttaaagcgttagagactggcgatgaaaaagcaacagctctttggactagatttagagatttaagtttaaaagaatttgaaagagtttataacattttaggcgttaaatttgattcattagctggagaagcattttataatgataaaatggatgttgttgttaatgaattgaaagaaaaaggacttcttgtagaaagtaatggggctcaagttgtaatgcttgaagaatataatatgccaccttgtatagtacttaaaggtgatggtgcatcaatatatgcaacaagagatttagcagctgctatgtatagaaagaaaacttatgatttccacaaatgtgtttatgtagttggaactccgcaagcacttcactttaagcaagtatttaaagtgttagaacttgcaggacatgaatgggctaaagactgtgttcatgtaggctttgggttagttaaatttgcagatagaaaactttcaactagaaatggatcgattgttttacttgatgatttacttcgtgaagctgtagagaagacaatggaagttataaatgaaaaaaatccagaacttgaaaataaagaagaggttgcaaagaagattggtgtaggagcagtaatttttacttaccttaaaaactcaagagaaaaagatattgtttttgattggaaagaaatattatcatttgatggagaaactggcccatatgttcaatattcatatgctagaggaaatagtatattaaacagaggtaaagaatgcactggaactgttgattatagtaaattatcttcaaaagaagaatttgagttagttaagagtatagctaactttaatagcgtaataactttagccttagataagttagaaccttcaatattaacaagatacgtaattgaagttgcaaaaggatttaataaattctataatgcgcattcagtattgaacttagaagatgaggatttaaaagctacaagattaaacttagttaaagcaagtttacaagtaataaaaaatggattagagttacttggaatagatgtagtagaaaaaatgtagttatttaatattaaatttagtataattttttttggaatagagggatgttttatgcaacaaccctctatttttaatttctttgcctgatgtaagaaataaatattaaaaaagtagagatactgcatatagaatgcctgatgatatttttgactcgttaatttcttttatatgccttaaaaaagtgatatatggtataattgaaaaaagcatggaaaggatgtggaatgaattgtttataaatagaaatattaaatatagggatatattaatatttgctttaataggtgtaattggatataaacttatagataattataattttttctttgatataggcagaaaagttttatctattatgtcaccttttatatatgctattatttgtgcttatatattaaatccagtagtgagtttttttgagaataattttaaaactagaagagcaatatcaatattgattacatattttataattatagctttaattattataatattattttttacgataccaagtatagtagacagtatagtaaatataactaaagaaatgccggcctatgtggaaattatacaaaaatggatcaatactcttcttcaaaatgaaagaataaagacactgattgtacaagcaggacttttgaataagctacaagaaatgtcaagtcagataggaagtgtaacaataggactactacaaaattttgttatgtacttattatcatttacatcaaatttagttagtgtgatttttggttttttaatttcaatttatgttttattggataaagaaaagttactaaaacgtgctagaaccataacatacatgatttttaatgaagaaaaggggaacaagttagttacatttattagaacctataataaaatgataggagtttacataggtataaaggcgattgattccgcaataataagtttgatatcacttataggtctattaattgttggggaaccctatgcaccactaatagccctgatagaagggattactaatatgattccttattttggaccactcattggtgaagtagtcggtgcaggagttgcaatatttgtttcacctatgaaggcttttatggtgtttatacttttactttgtattcatctttttgatgcttggtaccttgatcctaagcttataggaaaaaaggttggagtcagtcccttagggataatattaggagttgcaataggcggtggcttttggggaccttttggaatgcttctaggatcacctacaatggcaaccataaaaatatattatgagaaaacagtagaggagtttagaaaaaagaatccgggattagttaagaaagaaagccttggagaaattgatttataaaagattataaagaatttaggagaagttttatgaaggaatttattgatttattaaatgaacgtcaaagttgtagaaagtatttaaataaacctgttgaaaaagaaaagttagtaaaatgtattgaggctgccagattagctccatcagcatgtaatagccaaccatggcattttgtagtagttaataataaagagctagtgcctaaggtttcagaatgcttacaggatgcagttatgaataaatttactacagaatgtccagcttttataatagtggtggaggaaagtggaaatttaacttcacgagctggagcattaattaaacagcaggattatagatctgttgatattgggattgcaactgagcatatatgtttagcggcaacagaacaaaatttaggtacttgtattttaggttggtttaatgaaaaagaactaaagaaacttttaaatataaataaattaaagcgaattagattagtagtggctgttggatatccagaaaatgataatataagaaaaaaagtgagaaagaatatagatgaaattctaacttttatagaatagtcatggataaattttaacgacactatcaataataaatatatttggtagtgtttttacttatacaatttatatgatatatttcaaaaataattctttatcataattcaaaaaatattgcaagaatttccgtcgtgattgtgaatcgtgaaatgtgcattgtgaattgcaacatatatatttaaattaatcagatagattttataagcttttctgaaatgaaaaaataaagtataataaataagtataaaaggatgtgagttaatggcaaatataggtgcgttttttgatttagatggaactttatacagagaaggactaataacagaagtatttaaaaagatggttaaatatgaaattataggttcagaaagatggtataatgatctaaggccttactttatgaagtgggataagaggcaaggtgattatgatcaatacctgttgaaaatgattgatatatatattgaatcaattaaaggattacagaagtatcaaatggaatatatagctaagaaagttgtagaacaaaagggtgatagagtatatacttttacgagggacagaataaagtggcatcaagctaataaccatactctaattataatatctggatcgccttcagaacttgttggagagatggccaagaaatatggctttacagattatataggtgcaaaatatattatagatgataaaaatgtatatacagggcaagttacaccaatgtgggatagtaaaagtaaatcgaaggcgataaatgaatttgttaaaaagtatgatatagatttaaacgatagttatgcatatggagatacagcaggcgattatactatgtttaaaaatgtaaaacatccttattgtatgaatccaactaaagaacttttgcaaaaagtattgaaagatcgagaattaataaaaagagtgaatgttgttgttgaaagaaaggatgtaatatacaatttggacattgaggatatacaattcttatagaaaagagtgatactgtgattattcgtgaaaataaggtgaaggttgaagaatatagtgaagaatttatgatgaagtctctagataaagaatatacaccagaagaaattatcttctttgatttagagcattatgtatataagaagcctaagtgtattggagtatttggggcgtgtgagtatgataagaaaaataataatattctagtaacccaatatatgattgaagatagagatgaggcgacacatatattgtatctcgctaaagaatattttataaagatgaaacaaaaaggaaaaaaggccattatcactttttcagggaataatgatttttcagttattaattatcttttcaaagaaaataatatatattataattttagtgaagaatttgattcgattgatattcaaaaagaatatgaaaagaataaaaaattgtctattgggcttaaaaagttagaaaaagtttttgatattgtaagagagggagaggtaatcagcggatctaatttagctaaaacttttcacaaagttatgaaagataaaagctatttcaaaagaatgccagaagagaaaattgaaaaaattcttctttataatgagcaggatgttataaatttatattatatatatgtaaattggaaaaaatatatttatgaagatattatcgaagaagctatcgctgaagatgaagttgaagatttagaaaatctagaagaagagtatgatattcaagaaaattcattgaataataattctaattaatgactgcaaaataaataagatagaaataaataatttagaaataaataaattttatttctgatttttaaatgactccaagtttttggggtctattttaatgctttaagaacagccaggatgcttttaatataatgaagcatccctttttgtgttgatttatttttttgatatgttagagccgtctgagcagatgacgatggttccatctttatctgttctataagtttttatattgctttcatctaataattttgtagtaatagcatcaggatgattgtatatattatctttacctacagatataactgctattgaaggattaactttttttagaaagtctttactagtagaagttgaggatccgtgatgtcccactttaagcacatctgcgctgatatcttcattattattaagaatttctttttctacttccttttcggcatcaccagtaaataaaaaagaagtgttaccatattgaatttttattacaggagagtagttgtttaaattatcataaaaatccttattaggagagaagacatttactttagtattttcacctaagtcaatagaattaccattgttttttaatacatgtacctttaaatttttatcttttaaagcatctaccatgtcctcaaagctttttgtagtagattcaacttttggagaatagaaagttcctatactataagtttttattatatcatccatattaccaatatggtcttcatgtggatgagttgcaattacataatctaatttatttaagtttagccctgataaatagttgaaaagttttcttctatcagatttaggtccagaatctattaaaagatttttgttatttacttgaacgagaatgcaatcaccttggcctacatctatataatgaacgaacatcttgtttgtatcagcgttattggctttatttgaattgaattttgtaaggccacaacttactatggaaaatgaaaataatagaattgcaagaaaagttaataaatatttttttacattatacttatttttgttcataaaaaagttgtctccttgattacatagttttaatataattctaacatttaaggaaatgtaatggaaacaaaattattctaaatgcaagcaaaagaaaaataaaaagttaaaataaaacacgaacaaaattgtaaaaaggcgatataatattcatataatgagctttctgagcttttttatagcatagtcagataggagtggaggaattaactttgctgaattttaatttaagaaatttcttatgaacttgagagatttttagatgaaaaaaactttaaaatgaaaaatgcaaaggttgaatattgcaaaaaatatgatataattatttcaatatgtggaatttgaaatgaaaaatgcaatatttaaatatgaaaaaattcatatggggggccatgaaatgaagaaagaattttctatgagtaatgacaaagtgatgataaactttacagcaaagtactgtaatagctttgaggctatactagaaagtgatggatttagacgaattttagaagtttatctaagaagggctaaaaagaaaaattcagtagcatacagatatttaagtaagacattagatacagatagtcttatagatattagaagagatttaactgtagtaataaaatatttaacagttatgagtgttgaggaaattatagagattagtgactcatattcgaaattattagaggatagggacaagtttgtagtatttatagaagatttctatttattttggagaaagcttgaaagatatacaatagttcatagatataaggttcaacaaggccttgcagcagttagttttacagaagcaaatgctaacttttctacattaattctaagtttgtacagaaaaattgaacagcatgttgcaggatatcagccaaaagtttatagacaaataccagctggtggaaatgcctgcataatgattcatgaaatggaatgggtaagaccaaatggatatgaagctttagaggaagtaccatttattgatcatatacttttagaaacaccatttataacttatcctaaaaagaatacaagagatggaatgttcacagagataaaatataacccattaaagtatgcacaaataaataaagagcattggttttgttatccagctaagataggcgggttacttacttttatttatttccatagagattttatggaacatggaataactttatgtaatctgttcgagatggctagaagtgaagaaacaaggggaagaaagcctgatattatttatgtgtttggagctaaagataacgatgaagatctaaaaacagtgttctttgatgatgttcaaaatgatataatgcttggatatgtaaatcattcagaaaagatagattattttggttatataaagaagatgacattaacattatacaacttaataatgataaagagagggtatttgccaatacatggttcaatggtgaatattattttaaaaagcggagatgaagctaatgttgttatcatgggagatagcggagcaggtaaatctgaaagtttagaagcttttcgtagtttaagcgaagattatatttcagatatgactattatctttgatgatatgggaacttttaaaatagaggatggattaattaagggatatggaactgagattggtgcatttgttcgattagatgacttagatcaaggatacgcctttaaagaaatggatagaagtatatttatgaatccggataaggtcaacgctagacttgtagtaccagtagcatcatataaggaaatatcaaagggacatccaatagactttttcttctatgctaataattacgacggcgttaatgaaggagaaaaatatttagattactttaaaactccagaggaagccattaaagtatttaaagcaggtgctagaatggcgaagggaacaacaacggagaagggcttagtagagtcattttttgcaaatccatttgggccagcgcaaaagcaggatgaaacaaatattcttatagaaaaatattttaatacaatgtttgaaaatggacaagtaaaagttggacaaattagaacttgtttaggtgtaaaagggcaagaaaaaaatgggccaagaaatgcagctatagaattattcgatgaaattaaaggcatgaaataaatactaaggcataatcaaataaataacaagtccatttgccggcctatttaccattatgctacgttggcaaattgacctaatagacccgctatgagggcaatttgtcgccttgcataatgaaaaatatccatggcaactttggacttgttatttattttcatgtgcctaaaagagattaaggtaaagaattcaccttaatctctttttaatttatctcttaaagccttaaaaatatttaaagatctataagaaatacttgaaaagttttgtcttgattgtctattatataaattcatttttagcttactaaaaaatgattcaaagtgtctaattctaccaacagctttttcttttgtaaaattcaataatgaacttggtttatcaaataaaaaattagctggtacaaattgaaatgcaaaagacattttttcaaattgcattaaagaagctatagttaaactaaaatcaataagataataaataataataaagaaaataaatacctcaccaagtgttttgggaatattattgattatgtttaccactataggatgtattatcttaattatgcctacctcaccaactccccagagtagagaataaagtaaacaaacacgaccatgtatattaaatggatcgtcagtataatcccaccattttgtcttaaatgctttttctaatacaaaaccagtaatatattctaagactgttgtaaagaaacaggctaagaagaataaggcgaaaatattatgtttgtagttatcaagaaagactacaagaaataagacaccaaatccatatataggacaaaagggaccatataaaaatcctctattaacaaacctacgttcatttttaaaataatacaagacttcgaggcaccagccagcaaatgaatagaatacaaaaaaatatattaaattataaaaattaaaatttaatactgtacgcaaatgtatactaacctcctagtaaaatataagtattaataatttattccattatatatcaaaacatagctaaagaaatattaattttacattaaaaatttcttatcactatgtataaagcttaagtataaataaatattatattgagattagcagctatagaattagcgtttaagtcatttttattttaacaaatataatattaatatttattatgcagcattatactctagatctttcttgaacgaaaaaagagatagaatataaactagcaattccaactaaacaataaattattgtagataacattgaaaaacttccaaaaaggaaatctactaagttaaatctaaaaaaacctattaagccccaattaatgccgcctataattataagggcaagtgaaattgaatttaaaattttcataaaaaacacactccttattataagatacctttagtatgtatataaaaatgtgtttttattctatttttttataattattctaatgatatatttctgtctataggttgagatagagaaataaatgtatcagttctttgtactccatcaatgttatttatcttattaagtaaaacattctgcaaatctaaaatattagcacatacaactttagcaaacatagaataatcaccagtagttaaatgcaattcaactacttcctttatgtttgacatttggtcaaatacatagttaaaagaagatgttttatcaacatatatacctacaaaacaacatacatcgtatcctagcttaggaaggtttaaaattattctagaaccttttattattcctagatcttccattttcttcattcttacatgaatagtaccaccgcttacatggcatattctggcaatctccaagtaaggagttctacaatcttttattaataagtcaagtatttgtaaatctaattcatctaaatgattatttgaaattaaattcattatatcacctcatatcttttatatcatatactttttttattttatcaaatatacgcgaataattaaagataaaactataaatttgttaaaaaaaaattataatattgatattttaataaaaattattactttttgattataatgtatactgatgaaatcaacaacaattaaaaggaatgcttgataatagtttatatataaattatcattaaccatatagactttttataggaggatatgtgagtagatgaatctttttacatcaattattttatttgtattaatgcttcttgttatatttgtggcatatgcactatgcaaaaaatttatatttggtaaagtgcgtataaataagtggatacctttagcgatagctgcagtattatttgcggcccaaatattcgtaggtgcatcaaatacttatatttcaagtggattatctatttttgcagttctatttttcttatggttcatggatattacacaaagaggcggacttaagaaaaaagaaaagcaaatagtgattaagccaaaagctaaaccaaatagagttaaaaaaaataaatagaaacatagaaaagaaatagaatgtatgatttataacaatgtaaatgttttgaaatcatatattctatttctttttatatgaattatttttttagaatatatatatgttgcaaaaaaatcttcatcataattccaaagatattgcaagaattttagctataattgtgaattgtgcactgaaacatatatatttaagtatataaataatattattctggacctctaaaaatgggagaactaatagcgattttgttattatccagtgttatctttattacataccacaactcggtttttaaaggctcgtgagaatacaagtattttactttatttaaattcaagttagatattttttttattatagtcccaccagcagatattatatcaatttctaatattttgtgattaggatcatgagcaaaaattgaaaattgtaaattatcatcttccataggtattatatcgcccataaattcattatttattgtaaagtacataattaaagttctggattctgttgaataagtgcgtcgttttctaaaagcgtcgactagagactgagttgtaagctcttctgcaattatacatgttaaattttcatcgtcaccaaagtttaatctatgattatcctgaccattgattgcgcctagtttccagtttttatcgagtaaatggtaataatatttttcatatcttaaatacttgtttggataagatccatttccaacttctattgaagttattagtttatttaaaatagagttgtattctaaatatgttattgttttgtggggatggttaattgaaataaatgcattaggattattaagcatccataaaactaatagttgcatattatttactgttccagtaaagaacctgtttggatttactacattaatgtctccaaacggattagttttgctttcaaaaccaaccacagctaaaaagttttcatgttttttattataacgaacagttaaatattttagcgcatcccatctacttagctcagagctttttacttttattgtttttgttaaatgattattatggtctgttaatataaggaaattaaggccgttatgtcgtgcataatcaaatgcttcaattggagttccatgtccagtggaaaaattgcaatgagcatgaggaattccatagtaaaaattcagatcatctatattaagcttatttttaggtgatttttttttccccaaagttattacctctaaaaattatttatagtatatatatattgcaatgcacaatgcacaattcacaattaataattaattatggtttaaattattattttatttcgtatttctaaagtgagcaaaataatgacaataagtgaatgtaatgttaaaataaccttagtgtttagtgaggtgattgttatggtgaaaaattataaagacaaaaaacctgttttggatagcgatatttatgtttcagaaactgcagtaattattggagacgtaacacttaagaaaaatgcgaatatatggtttggtgctgttataagaggtgatgaagcatcaataactataggagaaaatacaaacatccaagaaaattgtgtggtacatgttgattatggatataatgcagttataggagattgttgtactatagggcatggcgcaataatccatggatgcaccattaaaaataatgttttagtaggtatgggatcagtaatattaaatggagcaaaaataggcaataatacaattataggagcaggaagtttaataactcaaaataaagaatttgaagatggcgttttgatacttggaaatccagcaaaagtgatacgaaagttaacacaagaagaaattgaaggaattaagaaatcatatataagttatctggaattgagtaaagatttcaagtaatttagatttaacatgttttatataaagaaaagatacaagttattatcatattgtgtagtaataaatttacattcaaggttctagtaatgtgagtaccaaattgaggatagcaatgtagaaagttaatttcaatatatagaatgatcaagaaaagtaataaagaagataacatcgattaagttgttatgattaatggaggaaattaaaaatgatatcagtagggcaatatagtaaattaaaagtaagtaaaaaagtagactttggatattatcttgaagataattttggtgatgaggtcttacttccaaacagtgcggcaaagggacatgaaataaaagaaggcgaccaattagaagtattcatttatagagattcaaaggataggatgatttcaactctaaaaaaaccattattaacagttggagagattggttatctagaagttgtaagccaaaataatattggggcattcgtaaactttgggcttgaaagagacttattcgtcccattaaaagagcaaagttacaagcttaaagaaggaaaaaaatatctattttatatgtatgtagataaaactgatagattagcggcaactactagaatacattcttatttagatatagcagaagaaggtaaatataaagtttctgatgaagtaaatgctatagtttatgaaataaatgagaatgcaactttaaatgttgcaatagatggtgaatatagagggttaatattagcaaatgaacattttgagtacatatatcctggacaggaaataaagggaagagttaagaggatttatgaagatgggactattggagttacaacgagaaagaaaaggttagaagcaagaagtgaattaagtgaaacaatacttaattatttaaaagcaaatggtggatttatgccttataatgataaatcgtcacctgatgatataaagagagaatttaatacaagtaaaaattattttaaaatgacattaggcgggctaatgagagagaaactaattacacaggataaagagggaactagacttttataagtgacaaatgaaaagtgataagttttatattaacttatcactttttttacatagcttattgcacatcgtttgatattcgtgttctgaataataaatttttaagagctttccagttaaatggaattaaaggatagaaatatttatcaccagctattgtttttgtacttgccataactattagaatgaatataataccacctataaagccccagaaaccaaagaatccacaaagtataagtaaaatcatccttgcaaattttaaagcaaaattcatttctatgctaggttgagtaaagtctcctatggtaacgatggacatatataatatagactgaggaataaaccagcctgtttttacagcgtaatcaccaaggattaaaccaccaatcaaagacattgcacttccaagtgggcttggagtatttaaaccagccagctttaatatatcaacagcaaattctaaaagcatgaattgaccgagcagaggcaaagcaaattcctcttgcggtttcaaaaagtcaaaataactcggtataaaaatattcccatttacaatcattaagtaaactggagttaataatattgtcgctaacattacgaaatttctaacaattcttaggtagtttccagtgaataaagggaaataataatcatttatatcttgtaaaaaatcgaaaattcctgttgggagaattattacgtttggagaattatccacaataataattatttttccttcaactatatgtgcagcagctacatcaggcctttcggtaaatcttacctttggaaatggattaagccaattttttgtgcacattacatcaactaaactttggtcagaaagcgttaaagcttttatatctacttttgatatgctatcaattattaaatcaagaacttttttatctgctactccatctatatacgcgatacatacatctgtttttgagacattaccaacttgatgtatatcaaaaactaatctaggatctcttattcttcttctaatgaaaccagcattaaatactaacttttcaatgaagccatctcttccacctcttaaagttttttccttttcaggctttgatgaatctgaacctggataagtacgtaagtctaatagtataaatgaatcataaccatcaacatacattattgtttggccagataataacgcgattaaaattttgtctaaatcagtttcagttttaacggatacgtgtgaaactttattattgataaagtcatcaattgttttgtatgaattcattgtttcaggtgttatcttaaagaaagattttaatatttcctccatgatagcatctttaataaaaccattcaaaaaatataaaacagagcttcttcccccaacaatgaagtttcgttcaacgatatcgaaacttttatctacaactaaatttgaatgaattaagtcaatatttgcttggtaattgtttgcaacattcaattattttaccttctctctctatttaaatatacatatctagtatgttacagataagaaatagtattcatgtttatcaaatatataagtttataattctttatacaattattagagggagaagttttttttatgctatttcacttttataggtgatgcatttcttataaatatgaaaagttttttgggtatagtgcactttttgtacgcaaagtttttaactgtacttgataagttcctaattgtggttcgaactttttttgtgtgaaatgatattggttgaactgtgtgatctctttaaaggagtatacttttttcagaagtgaaaagatattaactgtgattaataagttcctaattgtgcttcgcacttttttttactgtgaaatgattttaattgcactccgtgctctttttaactgtgaaaggatcctaaatgcactttgtgctctttttagctgtgcgtacttttttcaaatgtgtaaggatcttaatgtgctgtcgcactttctttaaagtaaaaagatcttaaatgtgctatcgcacttgttcaagaagtgtaaagttcttaattgtgctgtcgcactttctttaaagtaaaaaagatcttaattgtgctatcgcactttttataaatgtgcatattttaatagtatcaatactattagaaggtgaaatggatgtgcggaattgctggattagtaaattttaaaaagaatatagtacaagataaagatatattaaataatatgataaagactttggagaagaggggacctgatgcaaaaggatattatatatctccaaatgttttattaggccatagaaggcttatagttgtagatccagaaggtggattgcaacctatgactaaaatatttgagggtaagaaatacacattggtttataatggtgagctatataatactgaggatttaagaaaagaattaaaggctaaaggatttacttttgattcttattcagatactgaagtattgcttacatcgtatatttgttgggggaaggactgtgtaaataagcttataggtatatttgcatttggagtttttgatgaagataaaagagaagtttttttagctagagatcaaatgggggttaagccattattctatactgttcatgataatacccttgtttttggttctgagataaaaactcttttagcagatccaagagttaaaagagaaattgatatggaaggattaactgaaatatttgggcttggacctgcgacaataccaggaagcggagtatttaagaatataaaagaaattgcaccagccaactgtttattagtttcaggtgatggaaacattaaaaagtgggaatattggacagttgaagcaaaagaatttcatgaaacagcagaagaagcaatagttcatgcgagagaattattaatagatgcagtaaagagacaattagttggagatgtacctgtttgtacattcctatcagggggattagactcctcaattatatcagcaatagctgctgaggaatttagaaaacagggaaagaagcttactacttatgcgattaattatgaagacaatgaaaagtattttaaagcgtcattatttcaaccgacatcagatgaatactggtcagaagaaatggcaaagtttataaatagtgatcatagaaaagtagttttgaatcattcagatttagcagctgcattaagagatgctgtgatatcaagagacttacctggtatggcagatatcgattcatcaatgcttctattttgtaaagaaattcgtaaagactttgtagttggacttacaggagagtgtgctgatgaaatctttgggggatatccttggtttacaagggatgaaatgttctatttagatacattcccatggtcaaggtttgttaatgatagaaaggctatagttaataagaaattaaaaaatatgccgctagaggaattagttagaactcaatatgaaaaatctctaagtaaagtccctcatcttgatggggagagtaagagagattataggatgagggaagtgtcatatttaaatctaaaatggttcatggttcagcttcttacaagaaaagataggactagtatgtataatggactagaagcaagagttccatttgccgacattagattggttgattatgcgttcaacttgccagctgatgtaaaattatataaaggcagagaaaaaggattattaagagcagcctttgaaggaatattaccaaatgacattatatacagaaagaagagtccatatcctaagacacataatccagtttatacagacattgtatgtaagatgataactgagattttagataagaaatcttcaccaattcatgaaatcattgatgaaaaggtagttagagagataatactcacaaaaggagaatcatataaagctccatggtatgggcagctaatgactggaccacaattgcttgctttcttgattcaagtaaatatttggcttgaagaatataatgttaatctactaatttaatttttaattcataatgcacaattatgggtaagctactttggagttttaaaaatatatatctaaaaatttaatctttaattgtgaattgtgaatcgtgaattgtgaattaaaaaagttctgccttccagcagaacttttttctagatatatttgaactttacagatatttctttaatttcaccttttgaattttttctaattgaaaattgttttatgtctttaaaatcattttctaattgataagttaattctgtaatagtagctttagctttcttagttaaaccaccatcttcaataatttcaaatcttgattttctgcaagttgtttcatcatttttatcatcaataattacataatattcaggtgcttcttctatgaccacatattccttatttaaagttaaagttgaacaaagatcattatctatacattttattatcattttaatacctcctaaatcccttttatatgatagattgtactatagatattatcttgtttcaactataattaaaaagataaaaaaagtttgtcaatattcataaaaattgatcattaaaatattgtaataaatgtaatattttaattaccttatgcttatctatgatatttaattaacttaaatatttcattaagcaagaatgggattaaagaaatacatattactagaagccaatctctggcacttaaaataaatacattaaatacgtcagcaaagaaaggaattataattattagaaattgaacacacataccaagtagaattgatagcaataaatatttgtttgtgaagagtccaacctttaaaagagatttttctctgcttcgcatagagagtgaaaaaaataattgggaaaaacttaaaactacaaaagctaaagtttgagcatgaactagggagctcatatacaatctttcaccaagaagaaaagcagctaatgttacaccaccaattagtacaccatttaaagccagaaataaccccatgtgttctgcaaaaagtgattcttttggatttctaggtggatgctccattacgcttggatcctttggatctataccaagagaaagagcaggaaaactgtctgttattaaattcacccataaaatatgaattggtaataatggtggatcaaaatttaatagaatagctacaaacaaagaaactatttcgcccaagttacaggacaataagaatattatagcttttcttatatttgcataaatatttcttccttcctctacagctttgactattgtggtaaagttgtcgtcagttaaaatcatatcagcagcacctttagcgacgtcagtccctgtaatacccatagcaacacctatatcagcagcctttaaagatggagcgtcgttaacgccatcaccagtcatagatacaatattcccatggaatttaaatgcttttacaatcttaactttattttctggagaaactctagcaaataccttataattgttaactattttattaaattcttcatcgctatagctatcaatttcagcgccagtcatgcattcatttatactatttgcaattccaagttcactagcaattgcaaaagcagtatttttatgatctccagttatcataataggagttattccagcttgcttacataaagcaattgatggtttaacttcctctctaggaggatctatcattcccattaatcctacgaaagttaaatctttttcgagagaatctatgctgacgctttcatcctttatgtctttatagcttaaaccgaggactcttaaggcttcgtcagacattagattagatatttttaggatttcatcctttttttcttgtgtgaaatcaattatttctccatttaataagattttgtttgaaagtttaagtaaattatcaatagctcctttggtgaaaactttaaaatgtgaatcgtatttatttacagtagtcattagctttctatctgagtcaaaaggaatttcatcaacccttgagtgatctgtgcttaaatcttctttatataaatcatacttgattccagcatccagcaaagcaatttcagtaggatctcctgttttactaccatcttttgaagtagcatcgttgcataaaatcattccttcaaacaacaattttgtatcattatcacctagatcgcaattatcaatagatgcaagtttattatttatgcagcatttttttattgtcattacatttaaagttaaagttccagttttgtcagagcatattatattaacggatcctaaagtttcaacggctggaagtttttttactatagaattttgttttatcattcgctgtacacccattgctagtactattgcaacaattgctggaaggccctcaggaattgcagcaacagctaagcttatagcagttaaaagcatttcgaaccaatctcgtccttgaaacattgatattacaaagatcaatatacaaatacctacagctccaaagcctaaagtttttccaagagatgcaagtcttcgctgcaatggagtcgtattatcttcttctttatttagcatatcagctatttttcctatttgtgtattcattccagtatttacaacaacaccagttccgcggccgtaagtcactagagtggacataaaagccatgtttatcatgtcacctatgggaatattgttgtttgtaagtgtgacattactatctttctctgcagggacagattcaccagtaaatgctgattcatctatttttaaattagcactttcaattaatcgtaaatcagcagggagatatcttccagcatctagtataataatatcacccacaacaacttcttcagaaggtatttcttttataataccatctcgtttaactatagcttttggagtagataatttttttaatgcttcgagagatttctctgccttagattcttgaaacactcctattagagcatttattaaaattacaagcagtattacaattgtgtcactatattcgtgcataaatgcagaaataattgctgcaactaaaagtatataaatcataacatcgtttatttgagataagaatagctgccaaaggctctttttactttgagaagctaatttgttttctccatatttttcaaggcgatcttttgcctctgattcggaaagtccaacatcaggattaacatttaatttttgcagaacttcttgtgaaggtgcatcaaaccacatggataacatcactccattcataatttagtatatacatatatatattagaggtttaatgaatttatatacatgggaaaaaatgaaatatacatatcaaaatcaaatattaagtagagaaaataactggattttgatataattaattaaatatatatattgcaaaaataattcttcatcataattttaaagatattgcaagaattttagctgtaattgtgaattgcaacatatatacaatagagcgtaattagctatttttagagttttaaacttttagataaactttatttttgagttaggaaaggattgaatatacatggagattggtagagtgcgaagagggactgtaacttctgagagaaaaattatttctgaaaaaaaagatttttcccaaagttttagtcaggaaagacataaaaaatcagaagaacaactcaaaaaaatgatagatgacataaaaaaaaggggcaacagattagtaactactaagacttatgttgatgtggttatgtataaaaagatgataaaagaatatttagaatcgatactaaagttcatgtatgagactaaaaaagatattagcttttggcagactcagtatttcgtaacggttgatactgttgatggaaaacttgaagaattaacaaaagcactcctttctgatgaaaaagataatataaatatagcgtcaacaattgatgaaattcaagggatgattgttgatatatatagataataaatgatatacgtgttgcaataacatattcacatttacaaggctattaagttaatcgttcaatcaagatgggaatgtggaaatctaatttcagtaagtacataaatgtatattttttataaagagaaatatattagaacatgtttaataattattctacatgttcttttgtcgtttttaatctttattgaaattatagatgacataatcataaactatacttagactatgaaatatcttctaacaagaaatgagtaatatacttttgtggaatgtttcattggtaattttgatggaagtgattcttaattgaaattccaaatctatgatttggtcaattgaaattactcagtgaacgaagtgagtcgagtttcctttcaactattccaaatgtgctagttcaaagcttgttctttgaggctagcactttggtgcaactttatagccttagaatcacccatcagaattacctagaaactggaacaaaagtatgttattcatttcggtgagatatacgcataagtatagattatagttggatatccatacagatttggtatttcaattttaatatgttattataattaatagtgaatatcaattaattaatattactattaagtattttgatttaattcttaatttagatattaatattttttagggggaattagaatgaaaaaaaaggtatcattatttttaatcatgatattgtgtgtgtttacatttgcaggttgtggcagtagctcaaatcaaggcaaatctgaagataataagaaatcaacaaaagatattagctttgtaacaccagatgggcttacagctatagcagtagctaaacttataaaagaaaaaccggaaattaaatctggatacaatgttaattatactattgagcaaaactctgacagcttagttacaagcgttatgaagagtgagccagatattgcaattgttccttcaaacgtggcggcaactgtgtttaataagaacaaggaatataaaatagcaggaacagttggatttggatcgttttatataggcacaactaatcaaaatcaaagtgttgaagatttaaaaggaaaagaagtttacaatattgggaagggattaacgcctgatataattgcaagaacaatacttaaagaaaaaggtattgatgtagataaagaaattaactttagctatgtgaatacagtaaatgagcttgcaccaataattttatctggaaagtcagaatatgcagtaattccagaaccggctttatcaacagttcagagtaaaaatgataagtttaatgtaatgctaaatttaaatgaagaatggaaaaaattaaacgactctcaatatggatatcctcaatcaacaattatagttaagaaggaattgttagaaaatgataaggaatttgtttcagaacttttgaagcaagttaaagattcagaagagtggatatataataataaagaaactgttggagattattgcgaagaaataggagtttcggcaaagaagccaatagtagtaaaagctattgataggtcaaatataaaatacgtaggaataaaggattgttataaagaatatgaaacttattttaaaaaattaaatgaatttgattcaaaaacaataggaggaagtataccaaatgatgaaatattcatggaaaagtagattatatactttactatcatgtatatttttcatagggatatggcagctaattgcagtaataataaataatgacatatatattccaagattagaacaagtattagaagttattaagaatatttttggtgataaaaattcgttaaagataatttttagcagtttttacaggactacgactagttatgtattagctttgattttttcaatgattttaggggtgctcgcaacagtgtatccctttttcaagtatttaatggagcctgtaaattcatttagcaagacaattccaactatggtgttagtagttctttcattggtgtggtttgataaggatagtacaccatttgttgcaggatttgctatcatttttccaatactttatgaaggtatacgaaataaccttttgcaaatagataaaaaaataatagatatgacgaagatatatgaagtgagcttaagaaacaaaatcaaaaagatttatattccaactatgaaatcttattttatgagcatctttgtatcgacattttcattgacttttaaagttgtaattgcaggagaagtatacgggcagccaaagtttgggataggatcacagatacaggtagaaaaagttaattttaatactccagggatttttgcatggattgtaattattgtcattgtatctctagttttagagtttttaaataagttgttaaggaaaagaacatataggtggtccaaatgaatataagtattaaaaatctaaataagtcatatggaactgagaaaatttttgagaatttcaacatagatttttacgacgataagataaattgtataataggaaaatctgggtgtggaaagagtactctattagacattatagcaggtctaatagatgttcaaagtggagagataagtggcgtttcattaagtgatataagctatatatttcaagaagataggttaattgagtggcttactgttaaagaaaacttggaaattgcattagaaaaatatttcaaggattctgatttagagaatagaattgatgaagtattaaatttagttggaatttacgatacaaaaaacaaatatccaaatgcacttagcggaggaatgagacaaagagttaacatagcaagagcatttggaaagccatcaaaggtcattttaatggatgagccttttaaatctttagattataagttgaaatatgccataattgatgaatttaaaaatttattagataaagaaaaaagaatggttatattggttactcatgatctagatgaagctatatatttccgagggaatataatagtatttaacaatagaccagttaaaatagcaggaacattcattgagaatttagataaatgtaaggaagaaattttaaatataatataaaagttatatagtaggaatgcactactagtacacatttttaattatatatacaaattttgcttccaactaaaacgaataagaaacttgctattacaaaactggaaatacccaaaaattttttatttgcatttaataaattaatgccaagcaatgtatcacaaaggcctaagcaaataaagattaatgggaaaaaataatctggatcagatttacttgctatgatatttagtgaaaataaaggcaatagaattgctaagcagaagcttacaaaataaaatagctttttcataaaagttattcaccaccttacaattgggaaattatgtattatattaaagtatatacaagccatatgaattttattcattagaggaaggagattttaaatgataaaaaaatttatttcattttataaaccgtataaattattatttattttagatttagtagtagcacttatcgcatctttatgcgatttagtatatccagttatgacaagggatctagtaaatgaatcgattcctaataaagatttaaggacaattattgtatttgccatagcattacttataatttttggaatcaaggctgcatgtggatacttcatgcagtattggggacatgttgtaggtgttagaatgcagggggatatgagaagacatatatttaagcaccttcaaaaattacctaatagcttttttgataataataaaacaggagatataatgtctagaattattaatgacttaatggatatctcagagcttgctcatcatgggccagaagatttatttatatcaatagttatgcttataggttcatttataatattgtgtacaatcaatatacctcttacagttttaatatttgcattcataccatttatagtatggttcaccttgtatgagagaaagaagatgaataaagcttttcttgaaactaaagtagagacaggagcagtcaatgcaaatcttgaaaatagtatatcaggaataaaaatatcaaaagcatttgtaagtcatgaagctgaagaagaaaaatttgaaaaaggaaataaaagattcatcaatgccagagaaagagcatacaaagtaatggcagaatattcttcaggtgcaggatttggaatggacgtgctaagttatgtaggtttaataggaggaggaatatttacacttattggacttataaacattggagattttatggcatatatgctgtttataaaaatctttatgaccccaataaagaaacttattgattttatggaacaatttcaaaatggaattacaggtttccaaagatatatagaaataatgagtcaagataaagaaaaagataaagcaaatgcaactgaacttgaaaatgttcaaggggaaatagaatttaaagatgttaatttcagctatgaaggaaaagaagtcttaaaaaatatttctattaagataaataaaggaaagatgttagcgttagtaggagcttctggtggaggtaaaacaacattttgtaatcttatcccaagattttatgaagttgatagtggagatattttaatagataataagagtatttatgatgttaaattagattctcttagagagaatattggaatagttcagcaagaagttttcttatttacaggaacaataagagataatatactgtttggaaagacagatgcaactgaggaagaattattaagagctgctaagatggctaatattcatgaatttataaatacattgccagaaggatatgatacctacattggtgagagaggtgttaaattatctggtgggcaaaagcagcgtatttccattgctagagtttttcttaaaaatcctccaatattgattttggatgaagcaacatcggcactagataatgcaacagaacgcataattcaagaatccctagaaaagttatgcgctggaaggacaaccatagtagttgcacatagattgtctaccattaagaatgcagatgaaattattgtacttggaaaaacaggtataatagaagcaggaacccacgaagaattaatggagaaacaaggagagtatagtaatctacatagactagcagcagtttagactttagataaaagaaggttgccaaaaaccatatgttttggcaaccttttattagttattagattcattttttaatgaatttagtaattgtacttttttatatagagtagatacatccacatcaacatccatagcttgagcaagtttgttatgcaattcagtttcagcaggattcttctcgctagtttcagaatcttttattttattgttgaattttgcctgaaccaacctagagttttcttcgcttttcaatcttgccatattttctaattcattggaaaaagacgcttggttgtcagttgattgtgattgtgaagctgatgaatgtaaagtattatcaaaagatttagcattattttgctttttgttggaaggatttctagggttagtataaggcctctttattattttattatcaatagcagcaccagatacactagccacaatatattcacttctagaaattattctgttatcactcatataatatcccctccctaaaattataaattcagcttcaatatattacttatatattcgtatatttactagaaaagtttactaaatattctataatataatatatatttatttgcttaatatatatacgttgcaaaaataattattcatcataattataaaaatattaaaagaattttagctgtaattgtgaattgtgaaatggcattgtgaattgcaacatatataatataataagagagtaaaatatatgatgatataataaatttatacttaagattctaaagcttaagtacttatttaagaatgaaagattcaaattcaattgaaagatatgatacagtggttctaaataatagtataaaaaaatagtatgaacttattttgggctaagttcatactatttttttactttattttataattataagtattattctacttcgtatatccagccttctggagcttcaacatcaccaagttgaattcctaaaagtaaatcatataatttttgagttataggaccaacttcagtttcgctaaagaatacatgcaatttatcgttatgttggattccaccaataggagttattactgcagcagtaccgcaagcaccagcctctttaaattgatctatttcatcaataaatacttctctttcataaacaggcattttcaaataatgttcagcaatgtaaagaagagatctttttgttatactaggtaaaatagatggtgatttaggagtaacaaattcatcatttttagttattccaaagaagtttgcagcacctatttcttctatttttgtatgagtagctggatctaggtaaatacaatcagcaaatcctttttttacagcttcagcatgagcttgtaatgaagcagcatagttaccaccaactttatttccgccagtaccatgaggggcggctctatcaaaatcatctaaaactatataattgcaaggagatacaccatctttaaaataaggtcctactggtatacaaaatacaccgaagatatattctggagcaggtttaacaccaatgttgttaccaactcccattaaatatggtctaatatatagagttgcaccacttccataaggtggtacatatttttcatttgcctttacaacttgtttaaccgcatcgataaatttttcttttggaatatgtggcataagaagtttgtcacagctttcattcatacgatctgcattcaagtcaggtctaaataattgaattttgccttcttttgttgtatatgccttaagtccttcaaaacaactttggccatagtgaataaccgtagaagcttcacttatactaagcatattgtcttcaacaagtttcccttcatcccattttccatctttccaaactgaaatataacgaagatctgtttttatgtaatcaaatcctaatttaccccagtctatatcagcttttttccccatttttatattcctccaaatctataaggcttattgccattgtttattattgttatttaataacatctattttagcactatctaaaaaaaatttccacacatttgaaaaaagtacgcacctataaaaagagcacgaagtgcaattaagatcttttcacctataaaaagagcacgaagtgcaattaagatcttttcacctataaaaagagcacgaagtgcaaccaagatcatttcacatttgaaaaaagtgtaaagcacaattaagaacttttcacatttgaaaaaatgtccacatcaaaaaaccttaagtaatctaataataaatcaattaaggtttttcatcaaattatatataatagtagattattcccaaggcttagcatctgatggcatacgccagtcacctctaggacttaaagaaatacttccgactttaggtccatcaggaagagcacttcttttaaattgttgagtaaagaatctaaaaataaatttatcaagccatttttgtatttcctcatcagagtaatcatctttaaaggcagccctagctaaaaagaatattctctctttagttgagccatgtttaataaagtgatataagaagaaatcatgaagctcataaggacctacaatatcttccgttttttgagcgatttcaccgttagcatccttaggtaataattcagggcttacaggtgtgtctagtatatccataagaatatcacgtacaacttcggttgactcatgttgagctacgtattgaactaaatatcttacaagagtctttggaatagatggattcacagaatacattgacatatgatctccattatatgtacaccagccaagagcaagctctgataaatcaccagtacctattaagagtcctctttctttattagcaatatccattaaaatttgggttctttctcttgcctgaacattttcgtaagttacatcatgaatgtctttatcatgaccaatatcttcaaaatgttgaagagatgctttaactatatttatttctctaaggtctgtacctaattccttacataaattaatagcattattgtaagtcctatcagtagtaccgaaaccaggcatagtaatggttactatattctttttgtcaataccaagcaattcaaaagtttttactattacaagtaaggctaatgtagaatccaatccccctgaaattccaactatagctttttttgatcctgtatgctctaatctctttgctaagccagcagcttgaatattaaatatttctttgcagcgaacttctctttctttttcgtaagaaggtacaaatggatgtttatctacgaatctatcaaatgtacttattgaaacatcactaaattcaaatttaattgtgttaggttttttattgataaacttagatgaatctctaaaactcaaatttttcattctttcagactttaatttgaatacatcaactatagaatatattacttcgttttctctttgaaatctgtcattttcttttaataatgaaccattctcacttattaataaatgcccgctaaataatacatctgtagtggattcatgaacaccagcagaagaatatatatagctgcagattgatctagcactttgatttgatattaggctttttctataatccatcttactaacaagctcatttgatgcagaaaggtttccaattatatgagctcccataagagaaagataagaacttggtggaattgttacccataagtcttcacaaatttcaactccaaagtttgcaatgcttgatgaaaaaattaagtttactccaaaaggaacatctttttgaaatggtaaatctactctttcgtcctcaattgaaagaccttcagtaaaccatcttttttcgtagaattcactgtaatttggaagatatgatttaggaactattcctaaaacatttcctttaaataataaaaaggcacaattgtataaagtactttcacagagaagtggagcacctacagcaattaaagtatcatagtctttagtagattctaatatttcaaaaattccatctaaagctttgtttagcaagtattcttgtaaaaacagatctccacaagtataagcagttaagcaaagttctggaaaaactataaatttactttcattttttactgcatcatctatgcactgtaaaatatttttaacattataatcaacatctgcaactctagttttagggcaagcagctgcgacttttataaaatccatttaatcactccttgcaattataaagtttaagtttttttattggtttataagatatagttctaatataattaaatacgttttaagtatattttgcttagtaaacataaacatatcctaataattatatactaacatgtttgtgaaatcaaaaaaagataaaaggtataaaataactctttttgagttaataaatatcttgaaatattcataaatgtactgtataatataaaataagattacaaattcaagtatgtatgtaaaaattggacagtaaatcttagaactaatattataatgtttttaaggagggaagttgtatgggggcggcagttttttggttagttatagctatatgcgtatttgcaatagatattttaactagtaatttttgttttacactattcgcagtaggtgctgtcgtagctgcagtgtgtggagtaatggaagtgccatttataattcaaataatagtattttctgtactaaatataatatcatttgcagttggatacccgttactcaagaaaaaatttaaagcagcaaacgaaagaataccactaatggaagaaacatatgtaggaaaaattatgataagcgaaaaagagattatagataaagcccaagttaaagttggtggagaatattggactgtaataaatgaaggcgatattattcacaaaggggacaagtttactatcaaaggaatagaaggtataaaattaaaaattgaaaaggttcaggaggactagattatgagtgttattataattttaggggttattttactattaatattaatagtagttatctcatcaattaaggttgtaaatacagggcatttatatgttgtagaaagatttggacaattccatagagtattggaaccaggattacattttattgtgccatttgtagattttgttagaaggaagatttctacaaaacaacaaattttagatgtggagccacaatcggttataactaaagataatgttaaaatattagtagacaatgttatattttataaggtattgaatgcaagagatgcagtttataatattgaaagttttcaatcaggtattgtatactcagctacaactaatatgagaaatatcttaggtaatatgtcattagatgaaattttatcaggaagagatagtataaatcaagatcttttaagcattattgatgaagttactgatgcttatggaataaagatactttcagttgaaattaaaaatatagttccaccagctgaaatccaacaagcaatggaaaagcaaatgaaagctgaaagagataagagagctatgattcttcaagcagaaggtttgagacaatctcaaatagaaaaagcagaaggagaaaaacaagctaagatcttatcagtagaagcagaaaagcaagcaaatataagaagagcagaaggtttaaaagaatctcagctactagaagcagaaggtaaagcaaaggctatagaacaaatagcgattgcagaatctcaagctataagaaaagtaaatcaagctattattgagtctggaacaaatgaaactgttatagcattaaagcaagttgaagcacttaaagaaatggctaacagtccagcaaacaagcttatattaccaaatgagactttatcatctcttgggagtatagctgcaattggagaaatgctaaaaggatcaggaaagaaataataaactaaatacacttaaaagagagcaagataattgctctcttttaggtagtgaaccaaaatctttgattttgtgtgaatcaattaagaaggcatctcgaatttatgattcgatgatggtcgcttactctgtgagtactcagtgaacgaaagtgagtcaagtttcatctaagtagagaaacaatgtagagcgtgcaaattttaatttatttgcttgaacttttacatatttaatatatattattttaggtaaatcaattaattatgtttgaaataccgtttttggtgcaattattatattatataagtaggttaattaaatacagtaatttattatttatagaagggattcggtatagctgcgcatggattatagggataaaagaaaagagagaatactaaatagtcaaatgaaaaagttaataaaaagagaagacaagttcttttataaaaaagaaaatgaatatataaaaaataagatattacctgtaaaagagcaattagaagaaaaaatcccgaaaaatatgatagaaacttttgagaaagcatttgaaaagggattttattatgtttttgaaaaaggcactacagtaatagagaaaagttataactcagagaaaattaaaaatgaagcagatatagatgaatatattttatctaagcagatgaataacaaaaatttaagcagaatagataaaagagtgaaaaagggtgtgcttataaataaaggaatcacagcagctgaagggacattacttggtatattaggaattggaataccggatatacctgtatttattggagtaatattaaaaactgtgtatgagatttgtgtgaattatggatttgattataagtccaaaagtgagaaggcatttatattaaatataatttgtgcaagttctataaaaacagatgaaaaaattctatactcaaatgaagcggatagaattgcatatagtattgaaaataatcttgatcttaaggttgatataaatgaattaattgattcggcttcaaaatgtttatctgaaaatatagtagtgccaaaagttattcaagggatacctatagtaggagtgtatggtggaatatcaaattatagattactagcagatataagtgaagtagcaagtataaaatataaaaaaagattactatctaagttgaaaaatgcactttaggcagatggacttgttatttttttgattgtgctttaatttcattattgaaagattagcaaaaaaatattaatatagactatgtagtataaaaacaaactgaggtgaagaaatgaaaaagaaaaatataatgagctttgtacttttattaatactttctttttctttaattggttgtaatcttaaagatgattatatacttcaaacaaaagaagatacagatgaaaagccatctgcagataaggttaatgaagtttttgaatcagataagatgaaggaattaatggataaattaaagtctaaccctaaggaaatttctgataaagttaatgaagtagatagtgatactacacgtgtaatgaaagaattaaatgataaagcagatgaattaacggatgagctcaataatgctgattttgaaggaaaaagtgaagatattaaaaataaatttgatgatatatctaataaattagatgaaattaaagataatgttgatgatgcaaaagatagagcagatacatttaaggatccaattgataaaaagcaagtaacagatacagtagatgaatttacatcacatatgaataaccttgaaagagcgatagatagaatagcaaccactagataaaatgtatagttccaagtttttgacaggtataatgggctaatgtagctttcgttatacctgttataatttagaatataaaaaacacttgattcttttgctttagtatgataaagtgataaatagaaagtgatgtagggggttattacatatgaaaataaatagtttaataaaaaaattaacagtagttgctatcatagctacattgggagtaagcttggttgcatgtggcgggaatgccaataaatcatcagaatcaaaggcagcaaaaagtgcattagataaggatgaattagtaataggtttagatgatacttttgttccaatgggatttaagaatgagaacggggaaatagttggatttgatgttgatttagcaaatgcagtaggtaaaaaacttaataaaaaggtgaaatttcaatcaattgattggagtatgaaagaaactgaacttaataacggtaatatagatttaatatggaatggatattcaattactgatgaaagaaaagaaaaagttgaattttcaaagccatatttaagtaatactcaagttatagtaacattagcagattctaatattgaatctaaaaatgatttagcaggtaaaaaagttggtgctcagaacggatcaacagcagtagatgcagttgaagcagctaatggaatcgaaaaaacttttgatggtggaaaacttgttacgtttgaagataataacgctgcattaatggatttagaagcaaagagattagatgccattgttgtagatgagattttagcaagatattatatgaaagcaagaggagaagaaaaatataaaatcttaactgataattttggaagtgaaaagtacggtgttggaattaaaaaaggtgatactaaatttgtagaagcttttaacaaagctttagatgaagtgatttctgatggaactgcagcagacatatcaaagaaatggttcgaacaagatataattcttaaatagtgcaaattagataatcacaaatatttatacaaatagtttgaaaataaagaggaggaaataactttgagttatattttagagataatgcctcaagtattagagggattacaagttacattagaaatttttgtacttactttagtattatctattccgctaggagtaataatcgctgtaatgaggacatctaaatctctaatacttaaacaaataagtggaatatatattcttataatgagaggcactcctctgttattgcaaattattgtgatcttctttggacttcctctagtaggaatcagctttgatagatttccagcagcaattttagcgtttactttaaattatggagcttattttggagaaatatttagagcaggtatagagtctatagataatggacaagttgaaggggctaaggttctaggcttaagttctaaacaaacattttttagaataatacttccacaagcatttaaaacagtaatgccaccagttgcgaatgaaataacaactttagtgaaggatacttcattagtttatgtagttggtatggacgagctattaaagataggtaagactgctgctaatagagatgtttcgttggtaccacttttaatagttggtgctgtttacttagtagtaatagcaattttcagtcaagtattaaagaaaattgaagagaagtatgactattataaatagtgtggaggagattatatgcttaaagtaagtaatttgaaaaagagattcggaaatacagaagttttaaaaggtgttaatcttcatataaaaaaaggtgaaatattagttgtcgttggaaattcaggtggcggaaagacaactttacttagatgtgtaaatgaattggaacattgtgatgaaggcgatatagaagttaacggaaaagttttatgtaaaaatggtaagtatgtagataaaaatgcgttaaaagaaataagaaaagatataggattagtatttcaaaattttaacttatttccgcatatgagtgttttagaaaatcttattgaagcaccacaaaaggtgttaggatggtcaaaagaagaagcaataaagaaagcagaagaaactttaggtttcttagacttgttaggaaagaaaaataactatccatttgaattatctggtggtcaaaaacaaagagttgctattggaagagcattagtgcttgaacctaaaataatgtgctttgatgagccaacttctgcactagatccaggattaactggggaagttgcaaatttaataaagcgtttaagtgaaaaaggcatgagtatgatgattataactcatgatatggattttgctaaaaaagtgtcagatagaatagtatcaatggatgctggaaaattgcaagagggtctgatgtttgaagaagactagctatatcaagaatgaggttggattaaacctcattttttttaacaaattatatatttaagaatgtaagttttgatatattataaattgagaaggtttaaatttgataatttaattacacgaattagtgttgaaatatgtggcaaagtgtggtattataagaatgtaagataattcaagatttaatcaatactgtacattcgcctctgtttcagagattgggtctaggtatcaggttataatctttggaaaaagggaggatttttataatggaagatagaactttagtatgtaaagattgtggaaaggaatttgttttcacaacaggagaacaagaattctacaaagaaaaaggatttgataacgatccagttagatgtcctgattgtagaagagctagaaagcaacaaagaaacaacagaaacttcgacagatagtaagttgttgagtcataagagaaatcttatggctctttattttttatatagaaaaataaatttttagacgtagggaattatagtattgatagaaaacactataattatctacgtcttttttgagtgtagattatgttaaaattgatagtttatactataaaaatttgcacgatttaagaaaaagaaaaaatgttttataatacataaaaatatatagcaaataaagaaaacacgaattatataaaaacaatgtaaatacatagttcgcgaaaacataaattaaatgaaattttaacataaaataggttgacaacatacgtgttgaatgataatcttatggtatcgatacgaaagttagtggagtgttatcggaaaacattcgccattacgaaggtgtagtgagtaggtaaattaaaaaaatagcaagtccaatatacaagtatattgatgcggtattttttgaatgcacctaggctaaatctcataatattttttggaggaattaaaatgttaaatattagaagcgtattcgttgaaaagaaaaaaggatttaatgtagaagctcaaagtttattaaatgattttagagataacttaggagtaactggattagaagacgtaagacttgttaataaatatataatatcagatatacctgaagaatattataataaggctttacatacaattttttctgaagcaacagtagatgtagtttacgaatcagaattaccaatgaatgaaggagaagtagcttttggtgtagaatatttgccaggtcaatacgatcaaagagcagattcagcttcagaatgtctagctctattaaccgcagaagacagggttgaaataaaatcagctaaagtagtattattaaaaggaaacctttcaaaagatgatattgaaaaaattaagaaatattatataaacccagtcgattcaagggaagtagatataaatagcaaagatttatcatcgctttcaaacatacctaaagatgtacaaatcttagatggatttaccagcaagacattggatcaattaaaagaatttcatagtggacaaggtttagctatgagtattgatgatcttcttatgattcaagattatttcaaaggagagaaaagagatccaagtataactgaaattaaagttatagatacatactggtcagatcattgtagacatacaacattctcaactatcttagaagatatccaaattgaagataataaatacacagctccaataaaagcaagttatgaaagttatataaaatctagatcatatgtttatggcgagaaagaaaagaataaaactcttatggatatggcagtaattgctatgaaagaacttagaaaaagaggaaaacttgaagatttggatatttccgaagaaataaatgcttgttcaatcaatgtaaaaattgaaactgataaaggtatggaagattatttagtaatgtttaagaatgaaacacataatcatccaacagaaattgaaccttttggtggagcggcaacatgtcttggtggagctataagagatcctctatcaggaagaacttatgtatatcaagcaatgagagttacaggggcagcagatccaacagtggcgattgaagatacattggaaggaaaacttcctcaaagaaagataacacttggggcagcccatggatatagttcttatggaaatcaaattggtctagcaacaggtcaagttgaagaagtatatcatccaaattatgcagctaagagaatggaagttggggcagtaattgcagcagcacctaaagaaaatgtagtaagagaagaaccagctttaggagatgttattatcttacttggtggtagaactggaagagacggtgttggaggagctacaggttcatctaaggaacatacagtagattcacttaatgaatgtggagcagaagttcaaaaaggaaatgcacctactgaaagaaagcttcaaagattatttagaaattcaaaagcagctaagatgattaaaagatgtaatgactttggtgctggtggagtttcagttgcaattggagaactttgcagaggtttagatatagatttagacaaggttccaaagaaatatgaaggtctagatggaacagaacttgcggtttcagaatcacaagaaagaatggcagtagttgttacaaaagaagatgcagatgaatttataagactttcaaacgatgaaaacttggaagccaatttagttgcacatgttactgatgcagacagacttagattattctggagaggtaagaatatagtagatttaaagagaactttcttagatacaaatggtgctactcaaaagacaaatgttacggttaaagctccagttgattatccatatacagtagcagacattgatgttaaagaagaatggataaataatttaagaaaattaaatgtatcatcaaagcaaggattgtcagaaagatttgatgcaacaataggacatggaacagtacttatgccatttggtggtaagtatgcaaaaactccagcagaaggaatggctgctaaaattccagttcttgatggagagagttcagatgctacattaatgacatttggatttaatcctgaacttggtacttggagcccatatcacatggcatactatgcagtaattgaaagtatgtcaaagcttgcagcaatgggtggagattacagaaaagctagacttacattccaagaatactttgaaagattaggaatagaagcttcaagatggggcaaaccatttgcagcattgcttggtgcttatgaagctcaaatggcatttgaaacagcagcaatcggtggtaaagattctatgtcaggaagttttggtgatttagatgtacctccaacattagtatcatttgctgtaggagtagaaaaagctagaaatataatatcaccagaatttaaagaagcaggatcaagtttagttttacttcaaactgaaaaactagaagatggaactataaatgtcgaaaagcttaagaagaacttagatgtactatataacttaattcaaagcggaaaagtaatttcagcatctgctgttaagtatggtggagtttcagaaactgttactaaaatgacacttggaaatagaattggtgcagaaattgaaaacttaacaaaggatgagttatttggatttaactatggaactatagtactagaagttaagaatggtgttaatgtagaagaattcaaagagtgtttatataaagaagttggtaagacaataagttcagcagttataatttctaaggaatatgatttgaatttagatatagaagctttagaaaaaacatacgaagaaaaattaagctcagtatttaaaattaaaactgaagatgtagaaggaaaagtagaaacagttttatatgataagaaatcaacactttctccagcaattaaagtagctaagccaaaggttgtaattccagtattcccaggaaacaactgtgaatatgactgtgcaagagcatttgaaaaagaaggagcagaagttactcaagtagtatttagaaatattactaaagaagcacttaatgaatctattgaaagacttgcaaaagaaataagtactgctcaaattcttatgattccaggaggcttctcagcaggggatgaaccagatggttcaggtaaattcattgccaatgctcttagaaatgaaaagataagcaatagcgtgatggaattacttaaaaatagagacgggttagcacttggtatttgtaacggcttccaagcgttaattaaattaggattagtaccatatggcgaaatagttgatattaaagaagatatggcaacattgacttacaacaatataaacagacatatgtcttcaattataagtacaaaggttgtttcaaataaatcaccttggttcagtgaagttaatgtaggagatatacattcagttgcaatctcgcatggtgaaggaagatttgttgcaccagaaagcttaattaaagaattaattgctaatggtcaagtggcaactcaatatgttgattttgatggaaatgtatcattaaatatgccattcaatccaaatggatcaatgtacggaatagaaggtataacaagtccagatggaagagttttaggtaagatggcacatagtgaaagaataggaacagatttatatagaaacatcccaggagactttgatcaaaagatattcaaagcaggagtagaatattttaagtaagagttgaaagctagcaattgcttgttgattgctaactctcaatccgatgaaagatgtagaaataaaacttgaatataaaaatagttttatatttaaaaacttaaaaaggtatatatgtaaaaagttaaatttttaaatatgtataaagttaagtatataaatatttaaaaagataaatatgaagatatgtaaatagataaatatataaatatgtaaatatttatagttgtaatgcgggttggggatatttaaaggaaactcgactcacttcgttcgctgagtaagttcgaagggtgaaatcaaagatttcgattctcacttataatttggggtacagcccttaagagaaatatataaatgtattaataggaacattacaaaaacaggaggcttaaaaatgcaggtagcaatattttttggaagtaaatcagacacagaagttatgagaggagcagcaaatgctttaaaggaatttggagtaggatacaaagcgtttatactttcagctcatagagtaccagaaaaattagaagaaacattagaagaaattcaagctcaaggatgtcaagttattatagctggagcaggtcttgcagcacatttaccaggagtaatagcatcaaagacaatacttcctgtaataggagttccagttaaggcagctcttgaaggtgttgatgcattatattctatagtacaaatgccaaaatcaatcccagttgcaactgttggtataaataacagctacaatgcaggaatgttagcggttcaaatgttatcagttaataatgatgaattaaaaaataaattaaaagaattcagattaaatatgaagaaaaaattcattgaggaaaatgcggaaggggtagaactataatggaaaaattagaaatgttatatgaaggaaaagcaaagaaaatttacgcaacagataaggctgatgaagtaattgtatattacaaagatgatgcaacagcattcaatggagaaaagaaaggtcaaatcgaagacaaaggtataatgaataatgctataacttcagtattatttgaaatattagaaaaagcaggagttaaaactcattttatagagaaactaaatgatagagaacaattatgtaaaaaggttgaaatagttccacttgaagtaatagtgagaaatgttgcagcaggaagcatggctaagagattaggtcttgaagaaggatttaagcttaagactactgtatttgaattatcatataaagatgactcactaggagatccattaataaatgattatcatgcagttggaattggtgcaactacttttgaagaattaaaagtaatctatgatatgacagcaaaaattaatgacactcttaaagctgtatttaaagaacaaaacataaacttaattgactttaaagttgaatttggtagatgtgctgatggaacaatagttttagctgacgaaatctcaccagatacttgcagattctgggatgcaacaacaggagaaaaattagataaagatagatttagaagagacttaggtaatgttaaagatgcttatgttgaaatattaaagagaatttctaagtagtatatttagaatcagatttactataaaatttatattaaaatgcaattagtaatgcacaatgagggaactaagttcacagaggaaggttgagaattcgtacattaagtcttgagtgttattttgaattctcatttctctgatgaagtttgatgaattatgtgatttagaagtcaaaagaaatttcatccttaattgtgcattagttctcatgtattttaagtttttcaaaaatagattagtgaaaggattgtatagatgagtaatccgaattttgaattaataatggatccaagtaatgataaatttaaggatgagtgtggggtatttggagtatatactaataagccaatagatgtagcatcaatgacttactatggactttatgctcttcaacatagagggcaggaaagtgctggaattgcagtagcagatggtgaaaaaattgacatacataaaggattaggtttaataactgaagcatttaagcaggaagatttacaaaagctaaagggtcatatagctataggccatgtaagatattcaactgctggtggaaaaggcattgaaaatgctcagccaatacttgtttcatcaaagatgggaccaatagcgatggctcataacggaactttagtaaatgcagatgtaataaaagaattgcttgaagatggaggacaaatcttccatactacaacagattctgaagtaattgcatgtcttatagcaagaagtgcaaaaaaaggttttgcaaaagcagtagttgatgctatgtcagctgttagaggttcatttgcattaactattatgtcaaaggatagattaattggggctagagatccacatggaattagaccactttcgttggggaaaattgaagaaggttacattctaacttcagaaagctgcgctttagatgcaataggtgctgaatttgtaagggatatagaaccaggagaaatagttataatagatagtgaaggaatacaatcatacagatattctgaaaatactaaatgtcagacatgtgcttttgaatatatttattttgctagaccagactctagaattgatgggcttgaagttcatacaacaagagttaaagcaggagaacagttatataaagagcatccattagatgcagatgttgttatagcagttccagactctggaataccagcagctataggatatgcaaaggcttctggtataccttatgatactggatttattaaaaacagatacgttggaagaacttttatatcgccatctcaagaaataagagagagagcagttgcagtaaagttaaatccactaaaatcaaacttagaaggaaaaagagttatacttattgatgactcagtagtaagaggcactacgtcaaagcatttagttgaatcgcttagacgtgtaggtgtaaaagaagttagtttcttactagcatcaccaagtgttaaatatccatgttattttggaatagatacaccttatagaagtgagcttgttgctgctaataatactatagaagagattagagatatgattggagcagattatttaggatatctaagtgaagaaggcgtttataagagctgcggtgatagagaagaattttgtatgggatgctttaatggagtttacccagttgcaacaccagtagagaaagagatatagacatctaaggcacattcatctattgttttttgaatatgtcaatagcattttgaaaggtggagttaataaatgattacttacaaagaagcgggagttaacatagaagaaggatataaatcagttaagcttataaaagaatatgcagcaagaactatgagtcaatatgttttaaatggtcttggaagttttgctgggatggttgaattaccatcaggctatgaaaaaccagttttagtttctggaactgatggagtgggaactaagcttgaaatagcatttaagaacaagaagtacgatacagttggtattgactgcgtggctatgtgcgtaaatgatattttatgccatggggcaaaaccattatttttcttagattatatagcttgcgggaagcttgaagctgaagttgcagcagatttagttaaaggtatatcggatggatgcgttgattctgactgtgccttaattggtggagaaacagctgaaatgcctggattctattcagatggagaatatgatatggctggatttgcagttggtatagcggataaagataagattattaatggaagcaatattaaagatggagataagttgattggtatagcttcttctggaatacattctaatggatattcattaataagaaaagtattcccagatttaaatgaagaatttaatggcgaagaagtatggaagacattaattacaccaactaagatttatgtgaaaccagtacttaaattgttagaaagctatgagattaaaggtatggctcatgttacaggtggtggatttatagaaaatgttccaagaatgtttaatggtggggacttcacagctgtaattaacaaagattcatatccacttccagctatatttgaaagaatcattgaaaaaggtgtagacaaggagcatatgtataacacttttaacatgggaatagggtttgttcttgctgttaaagatgaagatgtggaacctattataaaggctttagtagaaatgggagaaaaagcttatgaaataggatacgtaacatctgggggtgaaggtatttgtttaaaatagcggtcttggtttctgggggcggaacaggcctacaatcggtaatagatgcggttgaaagtaactatatgaatgttaagatagagatggttataggaagccgtgataatatttatgctttagagagagcaaaaaagcataatatagatacttttgttgttaataggcgtgaatatggtgaagagtcctctaacaagatcttagaattaacaacgggaaaggttgatttaatagttcttgcaggatttttggcaattttagatggggaaatattaaaagaatttgataatagaattataaacattcatccatctttaattccatctttttgtggacctggaatgtacggattaaaggttcatgaagccgtaattaaaagtggtgtaagattttcaggatgtacagttcactttgtaaattctgaagttgatggtggtgcaatacttcttcaagaagttgtgccagtttattttgaagatgatgcggaaactcttcaaaagaggattttagaaaaagaacacgaaatattacctaaggcaattaagttaattagcgaaaataaaatcagagtaattgatggtagagtcaagatagaagaataaaggaggccttttcgtgaaaaagagagctttaataagcgtatttgataaagagggagttttagattttgctaaatttttagtatctaaagatgttgaaattgtatcaacaggtggaacttataaatatttgaaggaaaatggattaaatgtaattgaaatcaatgaagttactgattttcctgaaatgttagatggaagagttaaaacacttcatccattagttcatgctggaatattagctataagagacaatgaagaacatatgaatacattaaaaggaagaaatattcatactatagattatgtagttgtaaatctatatccattctttgagaaagttaaagaagatttagaatttgaagaaaaggttgaatttatagatattggcggacctacaatgcttagagcagcagctaagaattttcaggatgttgtagtaatttctgataaaaatgactataaagttgttatggaagagattgaagcaaatggcgaaacttcttataagactaagaagaaattagctggtaaagtatttaatcttatgagcgcttatgatggggctatttcaaacttcttgttagctgatgaggaggaagaatatccagaatatctttcagtttcatataagaagatgcaaagccttagatatggtgaaaattcacatcaaactgcagctgtttacgcatcaacaatgcttgatggagctatgaatacttttgaaacattaaatggtaaggaattatcttataataactttaaagatgttgatatagcttggaaatgcgctaatgaatttgatgaaccagcatgttgcgcattaaaacataatacaccttgtggtgttgcaattgggaaagattcttatgaagcttatatgaaagcatatgaagtagatccaacttcaatatttggaggaatcattggatttaatagaaaagtagataagaaaactgctgaggaaatggttaaaattttcttagaagttatagctgcaccagaatatgatgaagatgctttagaagttttaaagactaaaaagaacttaagagttcttaaattccataacactccaaaggcagataaatatatggttacagttgatggggcaatgcttgttcaagaggaagataataaattagtagaagaaattaaagttgtaactgaaaagaaaccaactgatgaagaaatgaaagatttattatttggaatgaaagtagttaaatacgttaaatcaaatgctatagttgttgctcacaatggaattgcacttggaattggcggaggtcaagttaacagaatttggccaacagaagacgctttaaagagaggaaaaggagctactatccttgcatcagatgcttatttcccatttggagatgttgcagagacagcagcaaaagctggtattaaagcaataattcaaccaggtggatctattagagatcaagagtcaatagacgtttgtaacaaatatggaatctcaatggtatttacaggatatagacacttcaaacattaatataaataagttatttatattaggtgattaagcaataaattctatattgaattgaaaatatataataaaaaccctgtgttttttaaagttaattgttatagataaacaagttatgaattagacttatgctttgaaatgactcccacattagaaagaaagggtactcttttgtgcagtgttgcatctgagaatatggctgtaggatttcttcattagaagttgttccatttttgcttgtaccaatcttgcattgggagcatgcagaaatggacgcaacttttaatgttagaaatccacagttgtattctctaagacaaccgaaacaacagagtatcctttctttcggttggttataacataggctatgagtgtatactgtttatctataacggaatattattttggaggtatgtaaatgaaacttcttttaattggttcaggtggtagagaacatgctttggcttggaaacttgcaaaaagtgaaaaggttgaaaaaatatttgttgctccaggtaacggtggaactgcaattgaaaataaatgcgaaaatgtaaacataactgatattgatgaattaattaaatttgctaaagaagaaattattgaccttacaatagttgggccagaagatcctttaacaaaaggaattgttaataagtttaaaacagaaggattaaagatatttggaccagctgaaaatggagcaatgcttgaaggaagtaaaagcttttctaaagaatttatgaaaaagtatggagttaagacggcagaatacgaaacatttacagatgtcaatgaagcgcttaaatatttagaagtatgtccttatccaacagtggttaaagcagatggtcttgcggcaggaaaaggcgttgctatatgtgaaactaaagaagaagcaatagaagcagtaaaatcttatatggtagatgatatcttcaatggagccggtcaaaaaatagtaattgaagaattcctagaaggtgttgaagcctcaattctatctatcactgatgggaagacaataattccgttcatatcaggtaaagaccataagcagatatttgatggaggtaaaggaccaaacacaggtggaatgggtgtattagctccaaatccttatgtgacagaagatgtgatgaaggatttcgaagaaaatatcatggctaagactttaattggtattagagaagaaggctttgattataaaggaataatcttctttggtatcatgattactgcaaaaggaacttatcttttagaatataatgtaagaatgggagatcctgaaacacaatcggtcctttatctaatggaaagtgacttagtagaagttatcgaagcggcattaagagaagaactagataaaactacaattaagtggaatgatggtgtctgcataaatgtcgttttagcatctaaaggatatccaggagattttgttaagggatatgagataacaattgatgaaaaagttaaagataaggtattcttagcaggagctaaggcagaggatggagttttaaagactaacggtggaagagtactatcagttattggtcttggaaaaactctagaagaagctagaaaagacgcttacgaaaatattaaatatgttacctttgaaggggcatattgtagaagtgatataggaacacataaataaatatatattaaagaaatgagctattaggtattattattatttaatcaataacacctaatagcttatatatatttcaaaaataattcttcatcataattctaaaaattttagccgtaattgtgaattgtgcactgtgaattgcaatgtatatgttaaaatttgaaattgtttcattttattcactatttgttcattgatttgtaattaattccatgttaaaatgatcattaaatagtaatattatgtatataaggaaactgtgattcgaatatttacttgggcactttatattcgatgagttaatagtgcaaccgacctttttattaaggtcggtcttttttcgtccgcttaaataagtatatagataataaattaaaattgaggtgcaatctttatgttattttttaatatgttaaagaaatatgatgaacatgggtttgattcaaaaggaattcataaaaacggtacaaaatttaatgaagagggttttgataaaaaaggggttcataaaaatggcacatattttaatagagaaggctacaatatagacgggtacgataaatatggatatgataaagaaggatataatagtggaggatatgacaggcaaggatataacaagatgggatataacataaaaggatatgataggaaaggggaatttttagaaacaagatataaatggaaagtgaaatagaaaaataaaaattgctataaattaattcaatatatattgcaaaaataattcttcataaaatttctaaaaatattgtaagaattctaggcgtaattgtgaaatgtgcattgtgaattgcaacatatatgtttacttagcagatttatgaaaaattcgttgtaaagtactaatgtagggttacatcttctcgcgcatgttcttaattcattagaacaagcaaaaggagactagccctgcattaactgtttttaatagcttattttgtgtagtttggtttgaatagatatgttgaaataataaatttacatttaaaattctagtaaagtaaatgtttagttaaaaccaaaatggagaaattctattgcaacatatatagtgcaagaattttagccgtaattgtgaaatgtgcattgtgaattgtaacatgcatatgcaataagttttttattaaaaattcataggaatatattgacatgcaattctacaagatgtagtataaaaacatgaatactacaccttgtagaattatatagaggagatgattgaatatgaagttagggaagatatcggacgctgaaatggagataatgaaaataatatggaaaaagaatgatcaaattactacagctgagattttagacgcgcttccaaaagaaaattcatggaaggtaacaacaataatgacgttgatatcaagattaactgaaaaggggattttgagtgtaactaaagtaggaaagttaaataattattttcctaaaattactgaagaagaatataaagctattcaaactgataatttcttagaagatattcataagggatcagttaaaagctttatggcaacattgtttaataataagaaaataagcaataaggatattgcagagttgaaagaatggctcaaagaggtgtagacatatgaatattctaaattatattctgcaaatgtcactagcaggcagttttatgtttttaatactttgtttatttgggccatttactaagaaaacttttagtgctacttggaattattatatgctatttataacgcttttgatttttattatacctattgggagttttgttaaactgcctcaaatagtggaatataagaattatttatcaatgcaggatacaaatacagtagcgcagcaaaataatgaaaagatgcttaagagcaatgataaaagtgatgagataagagttttgcaaggggatggtactcttaagcctgtaagccaaagccaagcggatttaaagcagacaagtatgatgcaaaaaataatgaatagaaatatgctgatttatgcatggatattaggtgtactcatactagtaattaaggaaacttacgtatatatttctttttataaaaaacttaaaagtgtaagtgatattattgatgataaatcaataattgatgtttttgaaaactgtaagaaaaaattaaatatatatagaaagataattctaaaagaatgtggtggcattaaaagtccaatgattacaggaatattgacacctactatcacaattcctaagatgaaccacaatctggacaagcttgaaataatactggatcatgaattaattcattttaaacgtaaagatttatgggtgaaggcagtagcgcttttagcaaatataatcaattggtttaatcctattgtttatattattagaaataggataaatataatttgtgagttgtctttagatgaacaacttataaagaatatggataaatcaaaaagaaaatattatggagaaattatattagagttaatagaatattctcagaataaatccctaagcttaggggcatcagtttgtaaaagtaggaaggagattgagacacgcttgaaaaatatagtgttttttaaaaagtcaaaaaaaatagttgtttgtatttcacttatggtaaccatgatttttacatctactagtttgcttgcttcaaaaactgtatttgctagtaatagtgatacagcaaaaagtgctaaaggagcagaatttgcagtatttgtatcagatgatgggctatacatgtctgaactaaaagaagataacccaattcttcttgataaaaatgaaaaaattaaattgccgaaaatatctaaagatggattatatgttgcttatactaaagaagatgatttatatatttgcaatatagagactcgtgaagtaattgaagtagctaaaaatgtagagtcatatgattggaataactcaggaaatttaatttgctctgctaaaaatgaaggtatgtctatgtataataccaatactaaaaagttagtagatattataagcaatgaatataattattttaatattaattgcgatagtaaaaataaagtatatgctaataaacagctagaaactactacagataacggaaaaactattaaatcaataggtataattagctatgacttagatactaaagaagaaaaggttattttggaaggtaaagaaggaaataataaagagattggagagcagtatacagcatctgagttatttgaatctattggatcaaggcctaatgttgagaggatatcaagtgatgatagatacatgtacgtatggaacaaacctaattcaggctcaatgtcagcagatatgacagaatttgcagtatatgatcttttaaacaataaatttatagaaaataataatatgattgcattagcatacaaagataatatttctcaaaatccagtggatagcagcatagttgctgttaacaatggcgaatatagagatatgtatagcaacaaaacattaggaattttcgatatcaaagctaacaaatttacaagtctaattccagaaaatcaagtatcaatgacaccggattattctagtgatggaaaaagtatagcatattctggagctgatgccttaaaagatgatatgtcacaaagttcgaaaaactgggaaagtgaaccacactatatttatcaagtgaacactgaaacaaaagaaataactcaaattacaaataataaatcatttgatttcatgccaaaatatttatcagaaaatcaaatattatttgtaagaaaagatggagattcatttagtttatggaagacaaaggatggagtagaaactaagcttgctgattctttgaattttaaaacaacttcttatacaaatacttggtactacggtcattataaaaccgaaaatgttatagatgtatataaaaataaatagtatatattgtaatagtgaagctacatttaaaattttaataaataaagcaccagcataagattaaatgtgcaaatcaaattgcaatatatataagttcaatatgataaaatactcaatttatatacaattgagtattttattattttagtgatataattctaaggaagtaattattttatcaggattaaatttaagagtatatttgagcataataaatattagaattaacaaatcaaatgaatggatgaagaacaagatggaaaacaaaaattatttatacaataattatataaatatggcgagaaatttaaggtcagaaaataacttattaaaagccatttcattttatcagaaggcatatgccttaaatataggaaaagaagatatagaattgctgatggatatggcattaatttacgatgaaattggattatctggtgatgcagagaaaaagtatcgagaagtaattgaattagatgaggatgatgctagagcatattatggcttggcaataatatatgatgaaaatgatgagttagaaaaggctaaaaattattatgagaaggccatagaaaaaaatcctaattatgataaagcatatttctttttagccaatatatatgatgaatcaggtgaaaaggataaggcgataagtaactataaaaaggttattgagataaatcctaattatatgtgggcatatgcaaatttagcttgtattttagaagaaaataatgaaaatattgatgcgctgaattatataaataaggctctagaaattgatgacagacattacaagatattatttaataaagcagtaattttaaataagttaaataagatagaagagagcaaagaatattattacaagtctattgaagaaaatcccaattatccttatagttttttaaatttatctgtagaatatagagaagaaggtaattttaaaaaagctattgaagtaataagtaagggaatagaagaaaatgatgatgaaggttttctatattataatagagcttgctattatgtaaatataaatgaaaatttaaaagcattaagagatgtagaaaaaagtatagaattaaatgaattctttttagagtatatgaagaaagacaaagaattggatccaataagaggacttgaaaaatataagaacctttaacaactcattttcaaatgttttcttcatattatgacccttgtggttacaaatatatttatgatttctagtgaagagatgaacttaaagttttagtaaatttgtaaatacattcatctaataagctgaattcttaaattggatatccatatggataaaccaattataagttagatttatactattaaatatatcccaactagaaataagaattatgcttttgtgaaatgtttcattaggaatttgatggctctgattcctagattataagttgtttcaagtatgctagttcaaaaagtgagaatcgaaaagtgatgctccaaattttatatttggttcgcaaaactttccctgtgggaatttcacatttcgttattcgaactttctctgtgagcgcttgttctttgatgctagcatcttgagtgcaacttgtaatcttgggatcatccatcataattccttagaaactggaacaacagcataatccttatttcggcgagctatatacataagttcaggtcttagtagggttatctatacagtactggaaacaatagaacggctgccctttgagtagtgcgtatatcctcattaatataatctatcttttaggaataaaatatttaaaataacaaaggataaacttaaagagtactttttgtaaataaggtagatttattataatatggaggaacaataatgcgtaaaataataatccgtttgataacgtttgtagtattcataacagtattcacaagtaatttagcatatgcacaaattccgaatatacctcagcagtatggccctaaaatatctaatttacagaataaggaggatattattaatagcttaaatcaaattaaagttatacgggcaaatttaactgtatataatataaaaccagatacgccagttgatgacttaaagaagtttgatgttgagatacagcgttatattgaccaacttagaattattaggactaatttggtaaatcatgctgataaatattcaaattcaatttctgacgtgtttttttcagaacaaattgtaattatagctacttgctatattgtaagtttaaagcaccaacaactcttagtaagagcaatagaaagcaatgtgccagaagcttcaacattattttattcaacgtatatgataccgatatattattaccttacattaggtgatgaacaaatagcttatactcaaacatatacagtaatttcttaataaattgaaatatatattgaaatgcacaatgctcaatttaatgcacaattatcaattatcatttcgcaatgcataattacatatgaaattctttcgatatttttagaattatgatgaagaattatttttgcaacatatatatattctaatgaagaaaaatttgaagaactttgaaatagataccattatataagaagagattttgttgaaatactggataataagataaaaagcaaaagaagccaagttttaaatattaaagcttggcttctttttgttataacttaatgtaattaatttgcatacttaacagtagataagtctgatgcatgttcatattctattgtttcattattatataggaattttacaccatcaatccattcgcctttagatttgttattagattgaaggaaattctcaatcaaagtattagctgtaactgaaccaccagttgatccttgaaactttggaacccattttttattatttgagtcagttaagtttatagtagcaacttttttgccgttaacagtatctatagatttaacttcaattggtaaattgtcaaattttttctctgatacagcttttgctaattcttttagcttgtcctgtagagctgaattttcatttacctcaatagtacctgattcatttggttctaaagagttatcatctatactatatatagaaagttttaccttatttactttttttgtatcgcttgtagtttcattagcttttttactatcagcattagaagagccattgtcgtctttattttgctctacagtagtagtgttattatcactaggcttaggggaatcactaggctttgtgctacaagaaaccattacggtacttaacattaaaactgtagctataattaactttctagtcatgatatgtacacctcctatgtttaaaaattaatattatagataatattaactaatttaattaattatatcatatgaaattgctaattaaaagcatacaagagactggaaaaaattgaaaaaaatttgacaatgtattttgagtatagtatattttgattatcaaactatttgattttaaaactttttgattaaaggcgaggcatactcagaaaatataaagtaaatatgtttgtttatatattttgtctaaagtaaagtgaaacttttcatgtagttcattctgaattcaaaatgaactttcctcagcaaatcttaggacaaaatatctttatgtcgtttgcttgttattttatttcatatgtctaattggtcaatagattgcgtatttggtatgatatttagaattttcattaccaaatttttcattttataaacactgaatataatttttgttagaagatatttttggatgccaaaatggagagtgcagataaatggataaatcaacaaaactgattaacgagcttttggtgcagttatttaatgatgtcttacaaattgaggagcaaagtttaaagaatggtgtactttcagatctttcaataacagaaattcatactatagaatctattggtatgtacagtgaaagaacaatgtcagaggtagcgcagaaattaaaaattacagtaagtactttaacaactgctatcaataaattaattaaaaaaggatatgtagaaagaaacaggatagaaacagacagaagagttgtccttattaaattaactagaaaaggaaagttagcattcagaatccatcagagatttcatggagaaatgataaataatgcaatagaaggattaacgttagaagaggaagaaattttaatttcttctttaagtaaaataaataacttttttaaagaaaaatatgaattagtataatgaaggagaaaaatatgagtaatattaaaattgctggaattggagcatatcttccatctctagtagttactaatgatagaataagtgaattcgttgaaacaagtgatgagtggatagtgcaaagaacaggtatgagagaaagaagaatctcagaaggagaaaatacatctgatatctcaacaaaagcagctaagcttgcccttgaaagagctggtattgatgcaaaagatttagaacttattattgttgctacaattagcccagatatgtttataccatcggttgcatgtctagttcaaagtaatttagatgcaagtaaggcagcttgttttgatataagtgttgcatgttcagggtttgtatacggattggagacagctaaagctttaatgatgtctatgaattataaaaatgcattagtagttggagctgaagttctttcaaaagtaacagactggacagacagaagcacttgtattttatttggagatggtgctggtgctgctgtacttaagagggatgaggcaccaggaataattaaatcatatttaagagcggatggaaagaagggggaagcacttactataggcgctactgattttgatactcctttttcaaaagagaaaaaattagctaaaagaactatcgatatgaatggtagagaaatacttagatttgcagtatctgcaatagatgaagctgttactgaagttatgaaagatactaatgtttcatttgacgatattaaatatatagtacctcaccaagcaaattatagaattataaaattagcagcagaaaagttgaaattaagcgaagataagttctatttgaacttagaaaaggtaggaaatacatcagctgcaacagtacctatagctttaaatgaaatgtatgaaaaaggcttactaaataaaggtgataaaattattcttgtcgcatttggtggtgggttaacttatgcagcaacattacttgagtggtaattaaaaataatagttaaataagcttttattatttaactttaaaatagatttatatataagaatggaatggttatggaaataaatatcatatcatttgagattaaaaataatacaagatgcaatttaatatttataaaaaaaccaatgtataaacgttggagaatatgaacttatttttaactttttagtaatctcattgataaaaatatgctataatagtaaaattacttatcatgataggtgaaatgactattatacatagataagattaaaatacaggaagttccattattatagtaagagatagtacattaagcgatattttgtgattggtaatggtaggaggaatatgttgtggaaaaaaatagagtatgtgacctgttaaaaatagaatatcctatatttcaaggtgctatggcgagaattgcagatgcatctttagcttcagcagtaagtgaggctggtggacttggaataataactggggcagcaccaactgaatgggtaagagaacagataaagaaaacaaaagaattaacaaataaaccatttggtgtaaatataatgttaatggcagaaaatgctgaggaaatagcagaattagtatgtgaagaaggcgtatctgttgttacaactggtgcaggaagtccaggaaagtatatggaaaaatggaaagctcatggaataaaggttataccagtagtagcttctgtagcactagctaaaagaatggaaaagtcaggagctgatgcaattattgcagaaggtactgaatcaggtgggcatgtaggtcagttaactactatgacattagtaccacaagttgttgatgctgtaagcgtaccagttatagcagctggaggaataggtgatggtagaggagtagctgcatcatttatgctaggcgctgaaggaattcaagttggaacaagattcttagtggcaaaagaatgtacaatacatcaaaattataaagataaagtactaaaagccaatgatatagatacagaagtaacaggaagaccaacaggtcacccagttagagttctaagaaataagcttgcaagaacttatcttaagttagaaaaagaaggagcatctgctgaagaattagaaaagcttggaattggtgcgcttaaaaaggctgttgtagatggtgatgtggataatggatcacttatgtcaggtcaaatagcaggacttatttgcaaggaacaatcatgtaaggaaatgattgaagaattatttacagaatcaaatgaaatatttaagcgttttggagggaatcatgaatagtagtaagactgcatttctttttccaggtcaaggagttcaaactattggaatggcaaaagaactttgcgataatataccagaatgtaaagaaatattagatcgtagtgaagaaattttaaatatgcctattaagaaaatgatgttcgaagggccagaagaaattttaacagcaacagaaaatgcacaacctacaatacttgttgcatcacttatcgcgttaaaagcactagagataaatggcattgaagcagattatgcagcaggccttagcttaggagaatatgcagcgttaatatacgggggagcactttctttagaagaaggattacttcttataaaagaaagaggaagaataatgggtagtgcgctaccagaaggccttggaaaaatggctgctgtgttaaaattaaatgatgaaaagatacaagaattattaactagagcaggtgaatttggaatagttgaaggggctaactataactgcccaggccaagtagttatttcaggagaaaacaaagcaatcgatgaagccgtaaaaattgcaaaagaattaggaggccttggaatttcgctaaaggttagtggaccatttcatagttcccttcttgagcctgcaagtgaagaattctttaatactataaaaaatgttgatattaaagaacttaacaaagtagtttattcaaatgttaaaggacttccttatgaaaaagaagatgatgttaaagaattattaaagagacatataagaacatcagtcctttttgaaaagactataaatcatatgatagatagcggcgttgatacatttatagaagtaggtcctggaaaagcacttagaggatttgttaagaaaataaataagagtgcaagtcttttaaatgttgaggatatggattcattgaaaaatacaattgataagattaaaagcaatctttaatatataaatatatatttattaaaagtaagtctctgcatttttatcttaactgacacatggtctgctaggattttaaatgtaggcttattattgtaaaatataggaatagttatttagaatgagtagatggattataaataattatttgcagcttagttataggttaattgtttataacaataggaggtaatttaatatatgctaaaaggaaaatgtgcaattgttacaggagcatcaagaggaattggaaaggcaatagctttaaagcttgcatctcttggagctaatatagttttaaattatagaagtaatgaaaaagaagcattggaagttgaaaatgaaataaaaggcatgggtgtagaaactttatgtgtaaaaggtgatatatctaagtcagaagaagttgataatcttatcaattctgccaaagaaaaatttggcactatagatataatggtaaataatgcaggaatcacaaaagatgcattaataatcagaatgaaagaagaagattttgataatgttattgatgttaatctaaaaggtgtgtttaactgcttaaaagctattactccaattatgatgaaacaaaaacatggaaagataataaatctttcatcagtagttggaattactggaaatgcaggtcaagtaaattattctgcgtctaaagcaggagtaattggaatgacaaaatcattagctagagaagttggttcaagaggaatcaatgtaaatgcagtagcaccaggatatatcgaaacagatatgacagaagctctagcagataaatacaaagaagagatgaagaagactataccgcttaagagattaggaaaagcaagtgatgtagcaaatgttgtagctttccttgcaagtgaaagtgcagattatgttacagggcaagttatccaggttgacggtggaatgttaatgtaatggaggaagtttgatttatggaaagaagagtagtaattacggggatgggagctctgactccgataggaaatgatgtaagtacgttttgggataatgcaaaaagcggaaagctaggaatagattatataactttagttgataaagatttagtagatgtaaaaatagcagcagaagttaagggctttgatccagatactttaataggtaagaaagaagcaaagagattagatagatttgctcaatttgctttggttgcatcagatgaagcaataaaggattcaggaatagatttagaaaaagaaaatctagagagatttggcgtaatgcttggatctggtataggtggatttgagactattgaaactgaatgtactaaaattgcaactggaaagtctaagagagtatctccatttttcgttcctatgacaataataaatttaggtgcaggaaatgtagctattaaatatggattaagaggaccatgtacatcagcagtaactgcttgtgcaacaggaacaaacaatattggggatgcatttagaacaataaaacatggttatgcagatgtaatgcttgcaggtggagcagaagcacctataactagacttggagttactggattccatagtatgaaggcattaaattcaggaaataatccagaaagagcttctattcctttcgataaggaaagaggtggatttgtaatgggagaaggtgcaggagttgtaattcttgaatctttagaacatgctgaagctagaggcgcaaatatcatagctgaagttgtaggatatggatcaacttgtgatgcatatcatatcacatctccagatccagaaggagcaggagcttcaagagctatgactgatgcgttgcaagaggcaggaattaaaccagaacaagtttcttatataaatgctcatggaacttcaacagaattaaatgataaatttgaaacagcagctattaaaaaggcgtttggagaagatgcatacaaagttccgatatcttcaacaaaatctatgacaggtcatcttttaggagcagcaggagcgatagaagcaataatatgtgcaaaggctcttgaagaaggatttatcccgccaacaatcggatataaaacaaaagatgaagaattagatttagattatgtgcctaacgttggaagaaagcaagatttagaatatgcacttactaactctttaggctttggtggacataatgccactttacttttgaaaaagtggaaataataaagatatatttggtaaaataaaaagtgttacatatattttatgccagaaaagttaaatgtagttaataagaaatattaacttttgaatgtgacttagtacggcataaaatatataaataatatttttgaataagatatatatataaattgcaaaaaataattcctaagaataattctaaaaatattacaagaatttcatatgcaattatgcattgtgaaatgataattgataattgtgaattgagcattgcgaattgaaatgtgaattgataattgagcattgtgcattaagctgtgaattgtgcattgtgaattaaattatgaattgtgaattgcaacatatataagaggaggatatttttatggactttgaaaaaattaaagagcttgttaaattggttgactcttcaagtttagccttttttgagcttcaaagtggaaatgatcatataaagatggataaatcattaactagaggattagctgataatggcgcaggaaattatactccagctgtaaacaatcaggttaacactgctgctagttcacttagttcagtagaaagatcagaaaatcatatagtggagaaagaagaagtaaaggctgctgaaaaagaagtagttatagacgataaggatgtaagtattataacttctcctatggttggaacattttactcttcagcatcaccagaaagctcacctttcgtagaagttggcggcacagtttctaagggaaaggttatttgcattatagaagctatgaagcttatgaatgaaatcgaaagcgaatataatggagtaatagtagaacgcttagctaatgacggagatatggtagaatatggccagccattatttaaggttaagggggaataattaatgcttaacataaatgaaataaaaaaaattataccacatagatacccaatgcttttaatagatagagtaactgaaatggaaatagaagaaaagcaatttgtaagagggtataaaaatgtttctgcaaatgaagcattctttcaagggcattatccagaagaaccaattatgccaggagtacttcaagttgaagctttagctcaaacaggaacagttgctattctttcaatggaaagatttaaaggtaagactccactatttgcaggtataaataaagttagatttaaaggaaaagttgtacctggagataagctagatttatactgtgaaattattaagattaaaggacctataggtattggaaaagggattgcctcagtagatggaaaaacagtttgtgaagctgaaatactttttgcgttgcagtaggataggtgataaaaatgttaaagaaagtgctaattgccaacagaggagaaattgcagttagaataattagagcttgtagagaaatgggaataagtacagtagctgtttattcagaaatagataaagaagcacttcatactcaacttgcagatgaagctgtatgtattggttctgcaatgcctaaagatagttatttaaacataacaaacattctaagtgcatgtgttttaactggagctgacgctatacatccagggtttggatttttatcagaaaatcctaaattcgcaaagatgtgtagacagtgcaatattaaatttataggtcctgattatgagacaattgagcttatgggaaacaaggctaaagcaagagaaattatgaaagcttctggtgtcccagtagtacctggatatgaaggtgaaataagagatgaagcccatgctttagaaattgcaaaaggtattggatacccaataatgataaaagcatcagcaggcggcggcggtaaaggaataagagttgcacataatgatgaagaattcttaatgggctttaaaactgctaaaacagaagcaaaagcttgttttggggatgattcattatatatagaaaaatttgttcaaaagccaaagcatattgaatttcaaatattagccgatgaacatggccatgttatacatttatgtgaaagagaatgctcaatgcaaagaaagaaccaaaaggttttagaagaagcaccatcaaatgtattaacagaagaattaagagctaaaatgggtgaaattgcaaagaaagcagctttagctgtagattataagaatgcaggaactatagaattcttgtttgatagagataataatttctacttcatggaaatgaatacgagaatacaagtagagcatccaattactgaaatgattacaggcatagacttagtaaaagaacaattgaagatagcatcaggagaaaaattagcttatactcaagatgatataaagattaaaggtcatgcaatagagtgtagagttaatgcagaagatccagaacatgatttcagaccatgtccaggaacaatagaagagctttgtgtcccaggaggcatgggagtaagagtagattcggctatattctgtggatataaaattcctcattgttatgattctatgatagctaaattaattacttttggtgataatagaaatgaagctattgtaaaaatggatagagcattagcagaatttgcagtaggtggggtaaaaactaatattgattttgaattatcaatacttcatactaaagaattcttagaaggagattatgatacttcatttttagcagaaaagatggtgaagaagaatgcttaaggatttatttgtaaaaagacaatatgcaactgttaaatcctcaacgttaaaaaagagtatttctgaagaaaagcctaatataccatcaggtatgtgggaaaaatgtgataagtgtaattcaatgatatatgcagaagacttagaaaattctaagttcgtttgtgcgacttgtggtcatcattttagacttaatgcaaaagaaagaataaaagtattttttgataaagatacttttaaggaattctggaaagacttaaaaactactaatccattagattttaaaggctatgaagaaaaattgaaaagcactaagactgatagtacagaagctgttgttactggagttggaaagctaaatggcatagaagtagcatgtgctattatggatagcttctttatgatgggaagtatgggaactgtagttggtgaaaagattacaagacttatagaacatgctacagaaaataagcttccattaatgattttcacagcatctggtggtgctagaatgcaggaaggtattttttcacttatgcaaatggcaaagataagtgcagctctagcaaagcatagtgaagctggtcttttatatatttctatattaacagatccaacaactggaggagtaactgcaagttttgcaatggaaggtgatatcattttaagtgagcctaatgcattaataggctttgcaggaagaagagttattgagaacacaattaaagaaactcttccagataattttcaaaaagcagaatttttacttgaaaaaggttttgttgatgccattgttgaaagaaagaatatgagggcatgtatatataaaattcttattttgcatggagtgaggaattaattatggataaagattttatgaaaattaatgtaacaccatgggaaagtgttgaaatagcaaggcacaaagacagaccatctgggcaatattatatagaaactatatttaaagatttcattgaatttcatggagatagaaactttggtgatgatcaagctataattggtggaatcgcatctattaatgatataaatgttacagttatagcaataactaaaggatcaaatactagtgagtatataaaaagaaattttggaatgcctaatccggaaggatatagaaaagcattaagacttatgaagcaggccgaaaaatttaaaaggccaataatttgttttatagatactatgggagcatttccgggtatgggagcagaagaaagaggtcaagggcaggctatagcaaataatctttttgaattaagtagattaaagacaccaataatttcaattataacaggtgagggcgaaagtggaggagctttagctttagcagttgcagataaaatctttatgttagaacattctatatattcagttctttcaccagaaggatttgcttcgattctatggaaagatccaagcagagttaaagaagcagcagcagttgcgaaaattactgctaaagatttaaagggttttgacataattgacggtatcgtaaaagaacctagaggcggagcacacaaaaatcctgttaaaacagcagaggttcttaagaaaacaattgtagatagcttgttagaattaaaagaaaaagatttaaatgaactaatagataatagatataataaattcagagatatgggaaacttttattaattatattttttaaagaagccacatctaaaaagatgatataacaagattagagattattaattaggtataatataggggctaaagagtagagaaatactctttagtcctattttttgtttatctataaattatcagattattttgaggtataagaaaagttaatgtgttataatgtgcctagagaatacgttggaggtatcaagttatggaaagtaatagtacaagagttgcaaagatagctactaaaatggctatatgtgatagacatgaagaagagcatttaaagaaagtatatgcagagaaaggaattaaagttacagcagtaaatgtaggcggaaatattaattcatcgatagctaaaatacttgaaagtgcattagttgctgcaaaaagaaacgaattaataagagaagagcatttgcatgaaggtgctgttataggtgcaactagagatgcggttattcaagttgcaaatagagcaaatggccaaaatataggtggaaagatcggaatagctagaggtggagaacatatttcagtatgcatattcttaagtattggacttctgcacttagatgaagtagctataggaatagggcataggtcattaccaatttaacaattcacaattatcagttcacaatacacaattaagggggaaaagccgtcggcttttctaaatatatatattgaaatcttaattcattgtgaatagtatatcgtgaactgatttatattcatatgatgatgaaagtaataaggaaggataagaattctattatttcgtctattgttcttttagtatagtagatatttgaatatataaataaggaaggttctaagctacgaggttgtattcgttttaacaagtcgcgttatcagtgtgataaactaaaatagaaaagccttcatgctaagggccttttttatgttttattttcaaatacactatgaatatatatgtatattgcaatttttgtagtgataaaatatttataatttatagtaaaggatattgctgttaaggatgaaaaagacataattataatttttacaataaaaaactaaaaaagcttgcaaagcatagctagtaactttacaagtatttcaaaatatgatatcataacttaaaagatttataaattattatcaatttatttgaataattatcataaatatagatatatatttatgattgtatttattgagaaggtagttggcattttggagtatagtaggaaattgataataagaatatagtaggaggatagaaatatggtaggaaaaaagaaagcagccatgctgctatgtacagttttagttggaggaattcttgcaggatgtggaaaaagtgcaacggattctaataatggaggcgcttcatcatcggcagtgaagaatattggagtaattcagttagttcaacatgatgcgttagatgcgtctaacaagggatttgttgatggattaaaagaaaagggatatgaagaaggtaagaatattaaaattgaacagcaaaatgctcaaggtgaacaagctaatgcgcaaacaattgctaagcaatttacagatgcaaagaaagacttgatttttgcaattgcaacaccagcagttcaagcagcttataattcaactaaagatattccaataatatttacagcagtaacagatcctgttaaagcagaagtagcaaaggattggaagagctcgggaacaaatgttacaggtacatcagataaagtccctgtggacaagcaaatagaattattaaaaaaattacttccaaatgcaaaaacagtaggagtaatttataacacttcagaaacaaattcggtaactcaagttgatgagcttaaagcagcggcagataaacaaggcttagcagtaaaagaaattggtgttacaaatgttaatgagataaatcaaaatttagcaagtgctttaggtcaaatagatgtattatatacacctacagataacacagttgcttcaggatatgcgttagtaggtaaactttgtttagataaaaacgttcctataataggtgcagaagaagcagtagtaactaaaggcggacttgcatctataggaatagattattacaagctaggaaaagaagctggatataaagcagcagaagttttagatggaaagaagccatcagatgttgaaataagcacattaagtgatatgtcatttactataaacactgatgtagttaagaaattaaatataacacttccagcagatatagaatcaaattgtaaaaaggtaactggaggcgttgagtagtgggtgttttaataaatattttagaacaagggctgctattttcattagtttcaatcggagtatatataacttataaaattttagattttcctgatttatcagtggactctacattcccacttggggctgcaatttccgcagctcttttggtaaatggggttaatccatggattagtataataatagcaaccttaggtggagcattagcaggaggaataacagcatttttgcatgttaagcttaaaataacaaatttaatggctggaatattagtaatgataggattatattctattaacttaagaataatgggaaaagcaaatgttccattatttaatactcctaatttatttaagtcatcaattccggctatagtagtgattttgataatggttattgtagttaaaatactattagacttatatttaaagactaaatcaggatttttgcttgtagctgttggggataatgaacaagtagtttcatctcttggagtaaataaagatttggttaaagtgttaggtcttatgataagtaatgcattagttgcacttgctggggcactaactgcacaatatcaaggatttagtgatgttggaatgggaactggtactgttgtaatggggcttgcggcagtaattatcggaacatcattatttgagagattatcttttattaaagtgactaccttatcaatacttggggcaatcatatacaaggcggcaatagcaatagtattaaaacttggattaaatgccaatgacttaaaattaatgacagccataattgtagttatagcattatgttctaatagcggtgtcttgaaatttaagaaaagaaaatctgttataggaggtagtgctaaagatgttaaaagtgaaacaactatccaaagtgtttaatcaaaatacaataaatgaaaatagggtttttgatagattatcattggatgttaagcaaggtgatttcataagtataataggttcaaatggagcaggtaaatcaacattgttaaatatgatatctggaacccttgaggcagattcaggatcaatattattagatggtgatgaagttattaataaacctgaatacgcaagatcaaagtctattgggagagtttttcaaaatccatcaatgggtgtagcacctaatatgacaatattagaaaatatcgctcttgcagataataagggaaaatcctttgggcttagctttgggataaataaaaagaggatagattattacaaagagatggtaaaagaacttaatttggggcttgaagataagctttataataaagtacagcttttatcaggaggacagagacaagctttaactctgcttatgtcagtaatgtctaaaccaaaattattattactagatgagcacacagcggcactagaccctaaaacatcagaaataataatggatataacaagaaatatagtaaaagatagtggaataacaacccttatggttacccataatcttaaacatgctcttgaaaatggcaatagacttttcatgatgcatagaggcaagattttagttgacgtcaaaggggaagaaaaagaaaaattagataataataaacttcttggactctttgagaaagctaatggagcagaagccttaagtgataggacattgtttggataggatacttaagcggctaaagcttagcaaagtatatttaacaataataaataagaaatcaaattatacatcgtcaaatagatatggcataaaaagatagtatctatttgacgatgtatttttttattctttagtaactgattatgaaggcaaaatcttcgtaaagtataatgaaaatagttttacttttcgaaagagattatagccgagttaaatctatgggtaacttttaaaagaagtgaaatctatagtctgctaaacagattctgttataatttaggtaacttgacttgtgtataaatttgagaaatacttctatagatataaatccatagattgctttaataaaattttataaagaaatagcatagatacctctaatattttaggttatgttgcaacacaaaaattctaagaaggttaacctatattgacaacaatattaaacgaaaatgaagcaataaacaactataattttagagttaaatttatcatattcatgatggagctatgaaaactggatggtattatgatgagaaatcttctaaatggtactactttaatgaggaaggtataatgcagacaggatgtataaagatagatgataaatggtatcattttgataataattgagcaatggaaactgaatgaatataaaaatccatgttaggtaggattattaaatttagtatacttatacgcggtaataacatagtgagattaaaaattttaaaatgctgaaagaaaaatatggtataattaaataaaaatggttaggagaatgatgtatggaaaagcttaaattaataaaagtaatatcatgtttactggtagtagcatcagtatcagtattaaatcctatagaaatatatgctacagaaacggaaggaaactcagttgaatcaacggatactatagtaaacaatgttggatcagagttaaaggttaattctgaaaaagaatcagataaaagtcttaataataaaaacacagtaagcgtaacaggagtaatgttaaatgaatcaagcgcagttattaatcaaggagatactttaaagctaaaggaaacagtattgccaagcaatgcggacaataaaaaagtaacatggaaatctagtaatacagatgtagcaagggtaagttcaagtggagaggtaaaaggaatatcacaaggaactacaacaatcacatgtacagcaaatgatggaagtggaatatcagatacatgtaaagtaacagtttactattcttattacaacaaaataggattgctaaataaagatggcagtgaaatggaactctatactgatgagaattataacagtaatagtatagttagtgaagcaaaaaataagagaatttattatgcaaaagcgtcatcagataatataagtgttaatataaaaagattagatgaaaagtatattaaagtatttagggtgacctcatattcagatattggtgaggtgagaagagcaaagcttgttgataatgataatattgttttagatccaggaacaacaacgcttattataagagtatataataataagccagattcaagcataaaatatgaagatgataataatatcttaaatgaatacgaagttaaagtggagttaaataagtgaatttaatattggaattaattttttattttaagtgagtagtttttaggatataatatttataagaggataatttggaaattttcttgagcaggagatgatttcgatgcaagtgcaaaataatatatttatatctttagatgaatttgataaaatacaagctaattatgatggtaaagccgaatactataacggtcaaatattatttagctcaagtacatcaatggctcataatagaattgttatgggaatatcatcgaccctatataacttttttaaaggaagtaaatgcacaatatattctgagtaaatagaagttatatttaaaaatgaaagtgaagtatataaatttttaccagatatatttgtaatgtgtgaggatactgataaaaaaggcgagagttttgtatcagcacctaaaataatatttgaagttgtatcaccagaatactcaaaccatgattactttatgaaagccaatatatatcagaggtttggggtgcttgaatataatatagttgaacaaaacggaataattacacaatattcattagtagatagagcatacatgacacctaaagttttaaatcataaagacctttatgtaagtccagtatttccagaattaaaatttgaattaaaggatatatttgaataggatggggtaacctcactcctatggaaaataaaaattatcaagtataagtattatgctaaatgaaaatttagagtttcgatagagtggtatttatcaccactctattttacttggacttaatattaaataattgtaaaatacccataataggttagcataaatattttcgcgatatacataataacattgtggaaaatttctactgttggaggaagtaaaaatgtttaagaaaatgctatctattataatgtttctaatgataatgtcatatatgttatttagctttaaagaaaaagccacatttgcgagtattaatgctgctgaaaaaagacctattagagtagctgtatttttaataaattttagtgatgattatatttctttagttcgcaaagatttagaagatattcaagaagaaaatccaggaaaagtagaatttacgttttatgatgctaaatcaaatcaagcagtgcaaaatgagcagcttgataatgtacttaaagaaggtgttgatcttataataatgcatctagttaagaacagggatgaattaacggtaaaaagagttactaatcaaattgctaaagataatattccagtgatattttttaatagggagccgctgctaagtgagattaaaagatataataaatctctatatatagggttagatgcaaaaagcgatggaattatggagggcgagattcttgctaatgaatggaacacaaatagagattccattgataagaaccatgatggaataatgcaatatgttcttttagaaggtgaaagaaataatttagtagcagctgatagaacaaaatattctcttttagcacttagtgaagcaggagtagaaactcaggagcttgaaagagtatttgcttattggagtagagagctcgcaaaagaggccgtagagtcgctatttttaaaaactggacctaaaattgaagctataattgcaaatgacgactccatggcattaggtgcaattgaggcactgcaatcctatggatataatttaggagataaagaaaaaaatattgcagtagttggtgttgagggattgccagaatcacagaagttaattaacgaaggattaatgttagggactatttttcaagacccaaaagcaatggcagaagcactttatactatagggatgaatatggttaaaggcagagatccaattgaaggtactgattatcaatttgatcaaacaggagttgcaattcgcatacctaatcaaattatatataagaaataatttgattaggtattaaaatagaagaagattaacttaattgttttgagttttaaggtattcataatagtaaagaatagcttcatcaacaatggtatttaaataaacattatcatcaatatgaatggctttaattttacttaagattcttacagtagagcgtcttaaagtataacttcttaccatatcaaaagcttcgccatcaacagatggggttcttccatttggattaacttttaaagttctgtggtccaaaatttcatttttgacatcaggattatatggaatatcatgagaatttaaattaggtgtagtattagtgctatcattgttactgtaattattattgctattgttgttgttgttggtggtggtatcgtgaatggtgggtggcgcaggatgttcaataagttcttcatcagaatcaaaagaaaatgattttataagagtcccatctaatttaagctctccttctgagaaggtaaatatatctgaagattcattttctacaatggaaaaatcatccttgatttcgccttttaccttagatttttttacagacatgttcatttataattcctccctatgtattaaagtatgaagaaataatatattatataagccttgtcatatgcagaattaattaccccctcatataagatatatgcaaatattaaaatatataaatactttaatatgaaaaaatttaaatttttttatatattcataggtttctaggttcatattttagaataaaaataggtttaaatgtttctaggaaaataggttcatgggaatatatttttctaggtaagtatgtttatagaaaaatatttacctaggaaaatatttaaatatgtaaatatttataggaaacatgagggtttgagatagatgaatgaaaatttatataaaatatattatggcagaagttaatagtgacagccataaaagagtacttagtacatttattgttttaagtaaataatttataggttataatattatgtatgttaagtgtgacaagctaaaggagagataagtttgaatttagaacagaaaattgttgatgatatattgcgcatatactataagtacgaaagtattaataaagttattctctttggatctagagaaagaggggataattatttatgagaagcattgattttaaatatatggagttgtggatgtgtttacttagccaaagtttatgaagtatgcaatcagaaatagttaaaagtgaaagataaaaatttgattaatatttattaaattgaatatgtactgcaagaattctggcagtaattgtgaactatgcattgaaaattatgaactgtggcttgttaactgtaaattgaaaatgtgaattgtagattgaaaactgtgcattgtgaattgaaacatatattatatcgaaaagggagatttaatagtgagtaaaagctttacatttaaactgtatctaatctttagtactattgctatattaatgcctacattatttattattttagtgcagcaaaaaataattatatcctttgaaaaatgggaaattagcaattttatttatttcatgtttactattattttattattagccattattgtaaataaaattataagagtatatataaaattaaaacaaatgaaaagtaatttaaatattggagataggaaatattctaatgatgttaaattaatagatggagaatctctattcaatgaaatagataaaataaatagaagtataagaatattaaaatttgaaaatagtattttatatgatacagcatttgctatatataatatggcatctatccaagagttattagatactatattagttcgtcttgtaactcacacaaatgcagactttggattaatatttttgttagaaaaagatgaacttaaactgaaatcacattctaatgttttatatgaagagttagaaaagacaactttcagaataggtgaaggtcttgttggatggaaattttataaaggacaggggttactcacggatgatgttcaaaaggattttagatatatacggtgcataagtgatacaagaggtcagattacaattcctataaaaatgcatgaaaaaatattgggtgtattagttttaggaagtaaaaaagattcagattttggagaatcagattttaaattgattaatactatatctggagaaattggacttgctataaataatgccaaattaactgctaagcttcaaaaagaaaatcaaaataatcaaagactgtttgagctaactaaaagaataacctcatctatgaatttggaagaggtatctaatatgggtattaagatagtaactgagattatagaagttcattcatgtactttaggtatatttgataaagtagatgaaaataagattaatgttatttcatcttatggggatgataaaaaaggtttggagtttagtggaactgtggaagaagcttttaaaaagaaacatatggctgaaataaaaacagataaagtatacatatattctattccactattatcaaaagaaagttgtatgggtattttacatataaacacaaaaaataaattgacaatagaagaaattgaacttataaatggaaccataacacctttgacaagtgcactagaaaatgcctttttatacaaaaatgtagaaagattagctacaagagatggacttacaggagtctataatcatcgttattttcaagatatgcttgatgaatatattataaaagttcaaaaggatgagaatgatctatctatggcaatgattgatatagataattttaaaaaatataatgatacttatggacatccagtaggggatcttcttttaaaaaaggttgtagaagttatgagaagcattttgcgtgatgaagatgtcatatttagatatggtggagatgaattcacgataattttgccttatactaatagtgaagatgcaggggctattatggagcaaataaagaatattattagtgattataaatttgaaattggtgataaagaagaagaaacagaagaaacagcattagatgtagaagtgataaaagaaagcatgttcaaatcggaaaaattatttaattctaatatctttaagaagtggatttctgaaaaagttggactaagcaaatctaagtctatatctaacacttttaatattactattagtgtaggaattagctctttagttgatgtcaattatgataaggaaatgttaataaaaaatgcagataaagcatcattaaaatcaaaacgaaatggaaagaatcaagtaaccatatggaagccagaattaaatatggattaaaaaataatccgaaattaatatatagtttcacactgaaatttagatcaggatattacataaataaaaatattttcaatatacatatgaaatatcgatgcgttgtacaggcgggaataccacttaccgtcgatacaacgtattttttgtggaataatatgtggattatagataagaatattttcatagctttttagaaaaaatttgtatctaatttcggtttttccatacataaatataattttaaatctggatatctgtagtacaaaagtattaaaaatttcttatatttcttatttggtatatggcataagttctataaagtgctataataaaaaatatttggatattaaatattttttgccatatataagctttaaatagtataattcattctttataaaactatattattgaaaaaatgatttttcatcataattctaaaaatattgcaataattttggccataattgtgcattgtaaattacaatatatagtttaagataaatttttatgaattagactttttaaaacatgtatattaagctctttataaggatgtggaacaatgtcgtttttgcaatttaatttttgtatttttttatttatattgattttggcatactatattttgcctaagaaggttcaatggatatgcttacttattggaagttacattttttatatatctgcgggtgtaaagattgttggatatataatttttacgacttttacagtctgggttggaacgattgtgataagtaaaattagtgaaaatatgaaaattgaattaactgaaaaaaaagaaacactaacatcagaagggaagaaacaaataaaggcttttgcaaagaagaagcagagaataattttctggtgtgttttattaagtaatttcgggattttagcgtttttaaaatattttgattttctatcaaaaaacattgttggattgtttaacatggtaacgcatcatggaacagttccaatgaagttggatttactgttgccattaggaatatctttttatacttttcagtccatggggtacctaattgatgtatataatggaaaatataaagcagaaaaaaacttatttaaatttgcactgtttatttcattttttcctcaaattgtacaaggccctattaatagatttgataaattatcagaacaactatataaaactcacaggtttgattggcagaaatttaaatatgcgctccaattgatcttatgggggctttttaagaagatggtaattgcagatagagcaatcacattagttaatgaaacatttaagaactatgataattatggtggtgcaattacagtagtaggagttttattctattcattacagcaatatgcagatttttcaggtggaattgatgtggctatgggtatctctgaattactaggaataaatatggctgtgaattttagaagaccgtatttttcaacctcactatcagaattctggcgcagatggcatatttctttaggtgcttggatgcgtgattatatattttatcctctagctctttcaaaaaaaatgtctaaagtatcaaagctagcaaataaatatattggaagaaaagcaggaagaattattccagttgccttttctaacttagtggtatttttagttgttggtatttggcatggagcttattggcattacgtagcgtggggattatataacggaattgtgattgcatttagcacgattgcagagccgttttatgaatggttaaaaagagtaactaaagtaaatactgaatgcttctcatatcatttatttaggatattaagaacattttttattgtaaatttaggatggtattttgatagagcaagtaatctgaattcttcactttatatgttacataatactgtagcaaattttaaaattactcaattacttgatggtacaatttataaacttgggcttaaagaacaggattttagaattttattttgggcaacggttattttatttgcagtaagtgtattgcaagaaagaggagtaaaaatacgtgaatttttatctaagcaaaatttagtttttagatgggcagtattttatgcattaatttttgctgtcataagttttgatgctagttccggaaatctcctaggaggatttatgtatgcgcaattttaaatataaatggtttagtggaattatatttataatggtctttattattttaagttatggcttagcatttgtccttgtgccaaaaggaaattattcacgaatgaccatgcgtgaaatgtattctgagaaaaaagattttgatgtagtatttgcaggtgcctcactatctcaaagagacattaatccatatattatggataaggaattgggagaaaatactttcaattatgcattttctcagcaaatgtttgtggggacttactattcattgaaagaactgttttcttaccataaacctaaactaattgttttgacggttgatccagataattttactagcaaggaagaaaagccaatagtatttctttcagtttctttatatatgaaatcatttttaaataagcttgaatattattttgcatcgtctcaagatggttcttatttagacaggctatttccgtggcgcggatatgatgtgaaatcacctcttgatgtagtaaacaatatttatggaaaatttgattctttttatacagattatccaaaaccaggacaagtagaagctatggaaaacaataagagtggctatgtagggaaaggattcaataaggttgatcctagtgatcaaaaaggaactctaaattacgataatctaaaattacctccttctaataaaaatataggtgatataaactcaaaagatatggaatatttagagaagatatctcaattatgcaaggaaaataattgtgagttaattcttttaacaactccatttcctacatttcaaattctcagagtaaaaaattactttgaatttgataataaggtggcggagatagcaaagaacctaaatattgaatattacaattataacttaataaagccagaattgtttaagcttaaaaatgattatctttgtgatacagagcatttgaatactaagggagcagaagctttttctaagtctctggcagctttcctaaagaagcgccaaaatggtgatgatatgagaaaatatttttatacacaatatgaatattatgcatcaatagattatgtttcatctgcttggttcaattggaaaaagagtgatagtactataacattaaaagctgattctctgcatgggtctaaagttataccagaatatcaatttgtattattagattcagaaaccggacaggagcatattatacgagattatgataaaaatccagattttgattttgattcaaagtcttataagaagtttaaaatacgagtaaatgctagggcaaaaggatctaataataatgaagctattcgtcattatgatgaagatgtctccaaataagagttatataaaagataatgtaaagtaagctatgaaaaaatagattatggaggaaatattatggaaaaaagcattttatcttatcttgaaagatcagaaaataagtttccaaataaagttgctttttctgatggtaaatatgaattaacttatcatgaattagttgaagaagctaaaagtattgggagctttttgatagaaaacataggtatgcgtaaagctgttgttgtctatatggaaaaaggctcacgaaatatttcagcatttatgggtgcagcatatgcaggatgtttttatgttccactggatgctcaaatgcctgtagagcgtattaacataatattagatacattgaagccagctgctataatttacgacgataaaacagaaaaatatctttcgcttatagaaacagattgcataaaggtattgtatgatgaaattcatatgttaccaaaaaatgaagaaaaattagtgactgcaagaagacaaatgattgatactgatcctttatatgttctttttacaagcggatcaacaggaattccaaaaggtgttattgtatgccatagatctgtaattgattatgcagactgggtagttaaaacttttgagttaaatgaaaatactacttttggaaatcagacaccattttatttcagtatgtctgtattagatatatttgcaaccattagaagtggagcaacattatatattattcctaaaatgttattttcgtttccagtaaagctacttgaatttttgaaagaaaaagaagttaacacaatttattgggttccatctgcattaagtatagtagctaacttaggagctttagatgtcattaagctgcctgatttaaagaagattttatttgcaggagagacaatgcctactaaacagcttaatatatggcgaagacatgttcctgatgcagtatatgcaaatttgtttggacctacagagattacggatataggaatatattatatagttgacagagaatttaatgatgatgaacctatcccgataggggttacatgcgataatgtagatgctctggttgtggatgaagatggacaacttattgaagaatgtggaaaagttggagaattgttaattcgtggatctttcttggcttgtggatattataataatccagaaaaaacaagagaagcatttattcaaaacccactaaataagagctatcctgaaactgtttattgtacaggagatttagtttactggaatgagaatagagaattagtatatgtttcgcgtaaagactttcaaattaaacatatgggaaatagaatagagttaggtgaaatagaaaatgcaatgagcgccttagaaggtgtggatatgtgttgctgcctatataataaagaaagtgatcaaattgttgctgtatattcaggaagccttgagactaaaaaattatcacagaatttgaagaaaaagttgcctcgttatatgttgcctaatgtctgctataacagaagcagcatgccactcaatatgaatggaaaaattgatcgcaagaagctaatagaagaatatataaaataaataaacaacattaaatttagatttatgttgtaacttaccgaaattataaatattttgattccgaaaaactatgaaaatatcgctgaaggttctaagcaacaggttgcatccactttagcatgctccaactttcctagggaagctcgactcattacattcgctgaggaagttcgagaacccaaaataaaattttggactctcacttcacaagctaaaatggaacaacctaccgctaagaacctttaacaactcattttcaaatgttttctacacaaatatatttataatttctagtgaagatatgaacttaaagttttagtaaatttacaaatatgtttatataatatgtaaaatcatacaataaaggagagatatattatggagaagttaattgaattattacaaggggttagagatgatgttgattttggtacatgtacaactttagttgatgaaggtattttggattcgtttgatattgttgaaattgttaatgtaattgatgatgaatatgatattgaagttcctgcaattgaaataattcctgaaaattttaacagtgcagaagcaatttttaacttgatacaacgtctttcagaagaatagattttattataagttaaatggcgagattgaaaattataattatataaaattactgcattaaattatgtttagtgcagcttttgctttaagcaagtgatatatggggtataatataagataactattaacactattggaatagaattcacaaatggtctaattaaaaagaggtggtcacttgaaaaaaatcgttatacttttatgtttgttctggatgggatttatattttatatgtcaggaaataacggaacaatttctcatgaacaaagcactaaggtggttaatataattgaaaatgctcaaagaaatcaagaaaaatcacaagctgaaaataaagataaggcagtaagcagtagtgatagttcccaagtaaataagaatagcattaatgttcagcaggaagaagcaagtaatttagatcatatagtaagaaaaaatgctcatgcatttatgtatatggtactagcaattctagtaagcagtgtattctttgcgtataataaaaacggaaaaggtatgataatttacatattgtttatttgtttattttatgctgtaactgatgaatttcatcaatcttttataccaggaaggacttcattagttagtgatattctagttgattttatgggagcgatgattggattgggattattttacttttgttattataagatttataaaagaaatagttttgactataatagtgcaaaaatacttgaataattttaaaactaaataaaataaaaaaacatctatgataaatccttgttataattgagttaccacacaacaatgacagcaaggagctatacataaatgtttcagaacacaattatatcagatgagctatcaatatacaattttttaaaacaactaaattttgatttttacttaactaagcctcaattaaaacatctagaaaatataatgaatgctatgatatcaaaagtttataactgtaaaatttctgacatagcggagcttgctcattcgaaacatcgaactagtattactagatttttttcaaatagtaattggaatgaaaaacttttagaaagagcattaaaagcatatatcatagaacttatttgggctaaatcaagagaatccaaacagccaatatactttatcatttatgacactatttctgaaaagataaagccatcgtcaaaggctaaaaatccaattgaaaagtattcgtttcataattctcatttaaaaggtaagaatgtatatggtcatcaaatggtagtttctttactattgtgtgacggattagtgctgccatactcaattgatatctatgataaagataactcaaaaattaattacaacacttccaaagcctgaaaataaagactatgtgttagcagatagttgtaaggatatttttaatgtttctgaaaaagccggctatagctatattggtgctttaaaaactaataaggttatttttccgtatggccatgaaagactaggataaaacttcataagtttgctacattattaaagattgaagactttgacctcgtcaccgtcaaagataaggaatactacatttacaattatgttggcaacttaaaagatagaaagattgtttctgctgttttaagttatcctaaagatgatttccaaaaagatggagcattgaaaacttttatttctttagaaaaatcattagcacagttagatattttaactcaatatactgaccgatgggcaatcgaaccattttttagagattgcaaaacgtacttaggactagatggatatcaagtaagaagtgggaaaagcattaatatatatctaatcataatgttagtaaattatacttattgcaaaatatactgtactgattttctttactttaatactggatataaagttgctaaaaaaaatttagagaattccaaagtaatatatatttacaaagctgccgcaagcggtacgccgatagaaaaaatttttgagtaattaaaaatagcttaataatctgtttttttattcaactgtaaaattattcaagcaaaactgcactattatagttttaaataaagattgaatattttttcttattaaggtatatacttagtatatgaaattttgaatttacaactattttatacaattccgctcacgagaaaggctggctgacagattaaactataacaatgaattcagatacttgtcttgttaagaaagatataagtacaaatgatggaactgatttaggaataacacaaactggattagctgaatatacagtaacagcagttatttctttattaaaccctaaaactggacaattatattatgtaagttcagaatctacaccattccgagcttaatagctgaatttatagatgaatataaagatttggaattattaattatatttgtattaaactaagagttttataataaaatatgataataacaattattgattaagagcagaagcaaagcggtaagaattttgaattcttactgctttcttatttttttatatctgctataatattacttgtcgctatttttatttctagcgaagagaaatattggggaaagtgttactttatataaaataaagtttattatatacattgcaaaaataaatcttcgtcataattctaaagatattgtgagaattttagacgtaattgtgaagtgtgcattgtgaatttcaacatatataagttaagaggcattaaagaaaaagagaagtccaaaactaccaagaagattttgttttgggttagacataagtaatatagcagtaagagcggcactaaggatatatctgttgctaaatagaatgtcaaattagtctttcagatttttatccaaaggattaaaaagtcagatttataaaaaaacatcctactcagtagtcgcctgagattttactctgatagaaaatgattaaagtgagatttgttattatttttgattgcgttttaaaacgataattgcagaaaggagtgggaaaggtgagaccattagcagatttaatgagacctaataaattagaagattttgtaggtcagcagcatatattagggcaaggaaagccattatataacttgatagctggaaaaaacatatgtaattgcatattttacggaccaccaggaacgggaaaaacaactttggctaatataatggctaattatgtagataagaaattttataaattaaatgcaacagttgcatcggttaaggatattcaggacataactaataatatagatagcttattaaattataatggagttgttttatatatagatgagcttcagcattttaacaaaaagcagcagcaggcattgttagagtttatagaagatggaagaataactttgattgcaagtacaactgaaaatccctattttgttatacacaaagcaataataagcagatgtaatatattctcttttaaacctttaactacaggtgacataatagttggtcttaagagatctatacaaaagcttatagatgaagggatagaaatagaatattcagatgaggcgctggagtatataggggaaatctctcaaggtgattatagaaaagcttataatattttagagctggctgtaaactctcaggttaagcaggttagagttatttcgagcgaatatattgaaagtctaggccaatcaagtatgcgggctgattctagtggagatgaattttataatttattaagtgctcttcaaaaaagtataaggggaagcgatcctaatgcagcagtgcactatctagctagattgattaaaggaggaaatttaactgctataattagaagaatatctgttattgcagcagaagacattggtcttgcatttcctaatgcattatctgttgttaattcaggaatagaactttcgttaaaggttggacttccagaggcaagaataattctttcagaaatagttgtatatttagcaacgcttcctaaatctaatagtgcatacttagctatagattctgctatgagtgatctagaaaacatgaattttggagatgttccaatgcatttaaaggatgctcattactctggagcagcaaaccttggtgttggtggctataaatatcctcatgattatcctaatcattatgtaaaacagagttatttaccgcaagaactgcttggaaagatttattataatgaacaaaataataaatatgaagagagtttgaggaaatactgggcagaaataaaaaaataatagcaattatcgtttgacaaaagccgagtattttggtaagatataagcgaatttaatatatcttttataatactagaaaaacaaagaaatatcaacaaaaaacgaaaaggggtgaagaaataatgaaactttcaactaaaggaagatatggagttagagctatggttgacttagcatctaattatggtggtgccccagtttcaataaaaactatatcaaagagagaaaatctttcggaatactatttagaacagttatttagcccgcttagacgtgctaatatgattagaagtataagaggtgctcaaggtggatatgttctatgtaaagcgccaaaagacataacagttggcgatattatgactattcttgaagggccagttgagatagcagattgtattgatggtgttgagtgcgatagctcggattgctgtgcaaccaaagcagtttgggaaaagattaaaagaagcatagacgatgttatgaactcaattacattacaagatatacttgatgattatgagacaattaaaaacaataagaataatattaagatagtggataggagtgaatgattatgaagaacgtatatatggattattcagctacaacttatgtaaagccagaagtattagaagaaatgcttccttattttactgaaaagtttggtaacccatcttcattttatggaatatcaagagaaacaaaaagagctatagataaggcaagagaacagatagcagaagcactaaactgtttgcctgatgaagtgtatttcacaggtggcggatcagaggctgataactgggctataaaaggtatcgcatcagctcataagaataaaggaaaccatataataacaactaagattgagcaccatgcagttcttcatacttgtgaatacttagagaagaatggttttgatgttacatatttagatgttgatgaagaaggtttcataaatttagatgacttaagaaatgctataaccgataagacaattttagtaagtattatgtttgctaataatgaaataggaacaattcagcctataaaagaaattggagaaatctgtagagaaaagaaagttttcttccacacagatgcagttcaggctgttggaaatgttcctgttgatgttaaagaaatgaatatagatatgttatcacttgcaggtcataagatttatggaccaaaaggtattggagttctttatataaagaagggaattaaaattgataatttaattcacggtggagctcaagaaaagaatagaagagcaggtacagaaaatattgcttctatcgttggacttggtaaagctcttgaacttgctactaataatttagaagagcatatggaaagattaactgcgttaagagagaaattaatagctggtttacttgaagttccatacactaaattaaatggaccaagaggagataagagacttcctggaaatgttaatgtatgttttagatttattgaaggtgaatcgattttattatcattagattttaaaggggtttgtgcatcgagtggtagtgcttgtacttcaggttctttagatccatcacatgtattacttgcaatcgggcttcctcatgaaattgctcacggatcattaagacttagtatgggagaaggttcaacagaagaagatgtagattatgttcttgaagttgtaccaccaattattgaaagattaagaaatatgtcaccattatgggatgactttttaaagaaaggggaaaattaatatgatatacagtgaaaaagtaatggaacatttccaaaatccaagaaacgttggagaaatagtagatgcaaatggtgtaggtgaagttggaaacgctaagtgtggagacataatgaaaatctacttaaaagttgaagataatatcattaaagatgttaaatttaagacttttggatgtggatcagctattgcttcatcatcaatggctacagaattaattaaagggaaaacattagatgaagcttgggaattaactaacaaagcagttgcagaagctttagatggtcttccaccagtaaaaatgcattgttcggttcttgcagaagaagcaattcataaagctataaatgattacagagcaaaaaatggattagaagtaatacctatggaagaacatagtgatgaagatctacatgctgctgtacatggagaagagtaataggtgaatttatgaagaaaaaagttttagtaggtatgagtggtggtgtagatagttctgttgctgcgtatttattaaaacagcagggatatgacgtcattggtgctacaatgcagatttggcagcacgatgaggaatttgaagaaagggaagggggctgctgctccctttctgctgttgatgatgcaagaagagtatgcgacaaacttgatataccattttatgttttgaattttagagattattttaaggaaaaagttattgataaatttgttcaagaatacatagacggaaaaactccaaacccttgtattgaatgtaataaacatttaaagtttgatgaacttttaagaagagcaagaggtataggggcagattatgttgctactggtcattatgctaaaattgaaaagcgagatgatagatatcttttaatcagatctgatgatgatagaaaagatcaaacgtatgctttatataattttactcaagatcagttagaacatacattaatgccttgtggagattatgaaaagacaaaaataagagaaatagcgaaagaaattggtcttgctgttcataataaaaaggatagtgaagaaatatgtttcatttctgataataatcatgggaaatatatttcagaagcagaaccaaatagggttaaaccaggtaactttgtcgataagagtggtaatatactaggtaagcataaaggaattgtatattatactattggacaaagaaaaggacttggactttcacttggaaggccagtatttgtaacaaatataaatgctaaaaccaacgaagttgtactaggttctgaagatgatatcttcaaaacagaattaattgcaactgatgtgaattttattccttttgataaactagaaaaagaaatagaagttacagcgaaaatcagatattctgcaagaccagcagaagcgactttaataccacttccaaatggtagggtgaaagttatctttaaggaaaagcaaagggcaataactaaaggtcagtcagttgtattttacgatgatgaaatagtagttggcggcggaataatagaaagtataatctaaagagttattgtaatttaaatatttttaaaactgagagtgcgtaagtgctctcgttttttttttttttttgaggttgcagaatatttcaatgtgcaagtagcagaggagtgttatagacagtaaaaagctttataggttcagagcaagctgcgcgttttacgagaggattaactatgtgatttagaattaaaaagaactttgtgagtaattatcctgatttaataattgatagaaataatactaaaaagtcaggataaataaacactggaagtgaatatgaactaccaactagagaagataaaatatttgcctatattttacataatagtattaacttatgaagatatacttgatataatatttttggaagtaaaaaattggaaggtgattttttgaatatcttcaaggcgttaaaaagatacgatgaacatggctttaattctaaaggatttcataaaaatggcacgaagtatgatgagtatggatttggtaaaagaggaatgcatagaaatgggacatattataatgaggaagggtatgatagagaaggatacgacaaaaaaggatatgatagaaatggatttaatagtgcaggttttgataaagaaggatataacaaaaatggatataacatattaggatacgacagaggtggtgaatacttagaagtaagatataagtggaagtgattgagtagatctaaataataagagaggaatgtcatgaagcgaataaaaagctgcatttttaaattggcatttagaatgaacattttatacttacattaatttttccaataactgataatggtagtgtctcttttattaaagttaaagaaaacggttgtatattattgaatagattcacctaaattctaaggatattaaaattttgtctcaaaaattttagttgatgaaattaagtacttactaaatagtaggtactatttttattctctagtactgctcatgaagacaaagtatccacaatgtatgatgatgaaagtattggtattttcgtaggagcgcgcccatagaggcaaagccttcgtaattaaccatattcgtctacgattttttaagtgtaaaattattgtgcggtaaaattatacatttgagtatattaatatgaataattttcctcttgttggagaccatatcaaatgaactagatttagtttattaactatattacttattttagagaatacagggggaacactacagtatatagtgtatagacataagcaggcataaggactttctattaaaaattattttggaggtgcacaatgtttaaaactagagacttctatttcaagaaagtttataacattaaaggcaaaaagattggcattatagaagacttatacatagatttcttttggggaaagattgtaggatttaaggtatccaatagccatctgttctctaaaaataactatatagacatggaagatgttatagatataggtgaagatgtaataatagaaaatataaaaaaaggtgagggacttacatttaaagagattaagtatatggaagttattgatacattggggaatgttaaaggagttctagaggatattataatagatatacaagattattcaattaaagcaatagttataagctcagggttagtagataaaatgataaagggtaagcaaattattctattaaatagatgcatcctcggagaggaatatatattatatacaggaaatgagggagttatgtttaaaactttacctcataatatggataggcacaatgcaattaagaaagcataaaaaagcaattcttctaggtataaccctattatgctttatttgcttaatattagcttacatttttaacaaatcaataaattcaataataaatattattgtagcatcttttattttagcttatactttgactcctattagggatggatttgaggcgaaatttagaataagtaaaaaaatatcctcaatagttgttatattaataattataggtatcataactgcatgtataattgttatagttcctacactatttaatgagatatctaatatcagtaatatatttgataacgtaagcaacttacttgaaggaatgttaaagaaaaataacttggatgacttttctaccactaatgtaatttataatgaaattttagaaaaaggaaatgttttttggacaaatttttcagaaaatgcagtggaaaatttaatgagcattggagataatgcaatgtcactagcaataatacctattatggtttattactttctttgcgatggtaataaaatatatagtaaaatgctgttgctattgccaacttctaaaagagggcttactaaaaaaatattaagcgatattgatagagtattaacaagatatataacaagtcaattgatgctttcgggattgataggcggattaacattgatattgttattattattgaaagtaaaatttcctttatggatttctatattgaatgcaattttaaacataataccttattttggaccaatttttggtgcagttccggcggtaatagttgcacttttagattctccaataaaggcattttgggtaattgtgggtatgttcataattcaacagcttgagggcgatattttatctccgaaaataacaggggatagcacagagatgcatccatttgttataataattttattacttataggagacaaatttggcggatttgttgggatggttttagtagtgccaatagctgtcattataaaagttttatatgatgatataaattactatctgttctagattttatagataaacaacttaaggattggatttattagatgaacattttacaaagttgctaaaaccttaagttcgtatctgcactagaaatcataaatatatttatagccacaagggcaataatatgaagaaaacatttgaaaatgagctgttaaaggtacttgagcagaaaacccaaaaagtgatgctccgaattttatatttggttagcagaactttcacacagtgcatctttgaattggcgagaatcgcttgctcagcgaacgaacgtgagtagagtttccgctaatggttgttctaatttggtttgtgaagtgagagttcaaaattttattttgggttctcgaacttcctcagcaaaagtatattattcatttcggtgagttatacgcataagtatagattatagttgggttatctataaaaaagcttatgcattaggggagtacaaataaagttgaatattgacataattatctatatgaaatataattttgatgaaataattaaatattaagcgatgaataggataagtaaatttatcatagtcatttcagagaaaaagtggttggtgaaaacttttggctatatattttgaagctacctaggagctataaattactaagtgatgtatgattatatcatacataattagggtggtaccgcggaattctagctttcgtccctatatctatttggggagagggctttttttatttggtaaattatacacctataaaaaagagcagctatgcactactgaaaagagaagctatgctgcaatacggaacttttctgcaattaggatcttttcgcctataaaaagagcagtggttctgcaattaatgacttgtcacaaataattatgaaatcttaaatcttcataagaagattataaacaataaaaagatattcacaatggatatcggagtcaactgttaactgaaaaaaatggaggaatagtttatgaaatttatgaaaaccaatgacttaagagaagcatacttgaaattttttgaaagtaaagatcatctaagaatggatagcttttctttggttccaaagaacgataaaagtttattattaataaatgcaggaatggctccgttgaagccttattttactggattacaagagccaccaaagagaagaattacaacttgtcaaaaatgtattagaacaggggatatcgaaaacgtaggtattacaagtagacatggtactttctttgagatgcttggaaacttttcttttgcagattatttcaagaaagaaataattccttgggcttgggaatttatcacagaagtgttggaacttcctaaagatagattatatgtaactatatatttagatgatgatgaagcatatgaatattggactacacttacagatgtagataaaactcatatatttagattaggcaaagaagataatttctgggaacatggtgcaggtccatgcggtccttgtacagaaattcattttaatagatcagaggaaataccaactaacgctgatgagttcgttaaattagcagatgaagataagataatagaattctggaaccttgttttcactcaatttgatggtgatggaaaaggaaactatgaaaaacttgctaatactaacattgatacaggtatgggacttgaaagacttgcaactataatgcaagagaagaatagtatttttgaaattgatacattagaaaatattttaagtgaagttgcaaaattagctaatgttaaatatggagaaaatcaaaaaacagatatatctttaagattaataactgaccatattagatcgataactttcatgatttcagatgatgttatgccatcaaatgaaggtagaggatatgtgttaagaagacttcttagaagagcagcaagacatggaaaaactttggggattaaagaagcattcctttgtaacttatgcgatactgttataagagattcaagtgaagcttatccagaactaaatagcaaaaaagaatatattaaaaaagtaattaaaatagaagaagataaatttagagaaactttagattcaggaatggaaatattaaatggatttataagtgaactaaaagcaaagaatgaaaaagttcttagtggtgtagatggatttaaattatatgatacatttggttttccgatggaacttacaaaagaaatattagaagatgaaggcttatcattagatgaagatgctttccacgaagaaatgaaagttcaaagagaaagagctagaagtgcaagaaaagtttctaattacatgggaactgatgttaaaacattagatattataccagcagaagttgaaactgtttttgatggatatgacaatgatactttaaatgcagaagttaaagtgttaattgaaggtgaagactttacagatgctataacagaaggaaataaagctattatagttactgatgttactcctttatacgctgaaatgggtggtcaaataggagatacaggtgtaatatttaatgatggttttaaagctaatgtgcttgatactaaaaagaacataggcggaaaaatagttcattttgttgaagttgtatcaggagagcttaaagtgggagatacagttactatagaagtggataaagttagacgtgaaaatattaagaagaaccatactgcaactcatcttttggataaagcattaactgaggttcttggatcacatgttcatcaagctggatcttatgtaagtaatgatagacttagatttgacttttctcattttgaagctatgacagaagaagaaattaataaggttgaagatttggtaaatgaagcaattacaagtgttacaccagttgttacagaagttatggatcttcaagaagcaaaaaatagtggagctataggtatatttgatgataaatatgctgataaagttagagttgtaagtgcaggggaatactctaaggaattatgcggtggaacacatatagataacacaggaaagattggtttatttaaaattatatctgaaagtggtattgctgcaggaacaagaagaattgaagctgtaataggaaaagaagcttataagatagtaaatgaaaagaaagatttattaaaagaaatttcaactaagcttaaatgctcagaaaaagaattattagctaaacttgatcaacaagttaaggagcttaaggaaaaagataaagaaataacagctctaaaatctaaattcgcatcaatgggaatagatgatatagtatcttcttcaagaaacgttaaggatataaatgtaatttcttatgaattaaaagacgttgatagtgatactttaagagatgtatgcgaaaaagtaagagataaagctccaaatagcatagttttacttatgagtgcaaatgctggaaaagttattatttgtgctatggcaactaaagatgcagtagctaaaggtgctcattgcggaaagttaataaaagaaatatcttctatgcttggcggcggtggcggcggaagaccagacatggctcaagcaggtggaaagatgccagaaaagatacaagaggcgattgaagaatcatataaaatagtggaaactttagcaaagtagtatactttttataaaaaataggttataatctaattatagttagtgaataaatttaaaaaataaagttaataataaatatggatatcgtttccttataaaatgattaagggggtgagttgctttaagtagcaattttatgagtaataatattgaacatacaatgcaatttgatttaagtaagaataaagaagctcttacaaaaacaatattaacagaggtttataattcattacaggaaaaaggatataatcctataaatcaattagttggatatttgatttcaggagaccctacttacatcactaattacaacggagcaagagctttagtaagaaaactcgagagagatgacatactagaagaagttataaaatcttatttagagataaagtagagagtgcccgtttataacgggcacttttaattttagtatatgaaagaaagcgtgatatcgagattttcttgatatttgctgcttatatgttgtgagaggtgctgtaatttgaggatacttggattagatttgggttcaaagactattggagtggcagtaagtgatccattaggattcactgctcaaggcctgactacagttagaagaactaataaagaaaaagatatagcggaaataaaaaagttttgtgatgaatatgatgcaaaggttattgtaattggattacccaagaatatgaacggaacaataggaccatctggagagattgcgatggcttttggaaaggttatagaagaagaacttaatgtagaagtgaaattctgggatgaacgtttaactactgttgcagcacataaagcaatgcttgaagctgatttgtcaaggaataagaggaagaagatagtagataaagttgcatcaacttacatacttcaaggatatttagatatgatttcaagaaaataaatatctgatggaataggaaattttgaggagtatatgtataagattaatttcttatacaatatgcttttattaataaatatatattgcaaaaataatccttatcataattctaaaaatatcgcaagaattttaatcgcgattgtgaattgtgaaatgtgcattgtgaattgcaacataaataaaaataaaatacagaagggatacatttatggataaggaagcaaaatatgtatatatacctgatcaagaaggaaatgatgttaagtttgaggttattatatactttgaaatagaaaaattaaaaggccaatatattattgcaactcctgcatttgaagaaactgatgaagcttatgcttttaagatattcaaagatgaggatggaagcgatatatttatagctttagaagatgacgatgaagaattcgaaatggtattagaaacttatgaaactcttatgaatgaagatggtttaattgaggaatagtatacaatctagtaatatgatattttctttaatgtttatttagagaaaaatcaattcatttaatatgaaaagtgaggtgtcatgtatggatgcatcaaatttaattgatatgaatgccttgaaggaagacttgaaaaaaaagggttataaattaacaccacaaagaagatcaattgttgatactattattgaaaatgaaggtcaacatttaacagcggaagaaatatatgatagtgtaaaaaaaagttgtccggaaattggattagcaacagtatatagaactattcttttgttagaagaattaggagtaatatcaagattagatctaaatgatggatgtagtagatatgaaatagtgcattcaaatgaaacgcacagacatcatcatcttatttgtaatatctgtcataaggttttggaagttcaggatgatttattagaggatttagaatctggaattgaaaagcaatataagtttaagattttagaccatagtttaaaattttttggcgtatgtgatgaatgccaaaagaagctaagtgatgaataaaaggacttttaatagaaaattaaaaataaaataaagtcaaaagtgtgccagatattttgccgtgaatgaagtaaggatatgtattttacggtttatatatttactaagaaaatgcatttagtgccatgcttaaaagggcatggtatcaaatggtaattgttattaaggtatatgtatttaaagtgaattaatatggctaaaccttatatgctaaataaagcaatgtaggcttatagattggaatgtagattaaggtcgcctatattaatgtgaaatatattgtcacataggacttgttattttttaatgctaaagaaagaacctttgtttataaatataatattaagaagaaggaggggaagtatgaaaaatgaaagagcgaagataaagataattcctcttggtggtataaacgaaatcggaaaaaatataacagctatagaatataaagaagatattattattatagactgtggactaaaatttccggatgatgatatgtttggaatagatattgtaataccagatgtttcatatctaatcaaaaattcagagaaaatcaaggggatatttttaactcacggacatgaagaccatataggagcgttgccgtatgtacttagacaactaaatgttcctgtttatggcactaagcttactcttggaatagttgaaacaaaactaaaggaacacggtttgttagcttcaacagagttagtaagagtaaagccaaaggatataattaaacttgatagtgtttcagttgaatttataaagactaatcactcaattgcagattcagttgcaattgcagttcatacaccacttggggtagtacttcatacaggagattttaagattgattacacaccaattgatggagaaatgatggattttggaagattagctgaacttggaagaaagggagttttagtattaatggcggattcaacaaatgttgaaagaccaggatatactatgacagaaaaggttgttggcgaaactttcctaagactttttggtaaggctaagggtaggttaatagttgcaacatttgcatctaatgttcacagaattcagcaaataattacagctgctgaagcttatgaaaagaaggtagcagtttcaggaagaagtatggagaatattgttcaagttgcaatagaacttggatatctcacagttggaaaagatgtacttgttccagtggatcaaatttcaaaatatccaaacgaaaaaattgttgtaataacaactggaagccagggggaaccaatgtctgctcttgcaagaatggcagcatcggagcatagaaaaattaatgtaattccaggcgatacagtaattatttcagcaacacctataccaggtaatgaaaaatttgtttcaaaagttataaatcaactatttaaaaagggtgctcaagttatatatgattctcaggaaaagattcacgtttcaggtcatgcatgtcaagaagaacttaaactaatgcaggctttagttaaaccaaaattctttgtgccagttcatggtgaatatagacatttaaagaagcatggtgaattagctatggaagttggactttcagaaaagaatttattaatacctgagaatggtgatgttatcgaagtagcaagaaattatattaaaaagaatggtactgttgtttcagggcaagtgtttgttgatggtctcggtgttggagatgtcggaaatattgtcttaagagatagaaaacatctttcacaagatggtatattaacaatagtagttacaatagagaaacaaactggaagggttgtatccggtccagatataatttcaaggggattcgtctatgttagagaatctgaaggtcttatggatgaagcaagagaaattgttaaatctgtattaaagacttgtgaagaaaaacagattactgactgggctacattaaaatctaagatgagagatcaacttagagagtatctttacgaaaagactaagagaaaacctatgatattgccaataattatggagttttagaagttttttgaagtgtgaaagaaaatagtgattctaaaactgcaaagaatatattttgttattgataattaaattatgaattaactaaatattaaattgttaaatatatattctttggaatagggttgactttttttgatgaaaagagtagaatttataatagttgtgtaggaattggatactttaagtatccaattttcttttggagaaaaacagttataggtttacatttatatgtgaataattttaatcgcaatttatttataataatagtaataatatgttaacagtatgaagttatttacagtgtatacttaaattttaactaatttatatacaaactaaagagaaactataaaagaaaaattcgcagcttgcttgctgtttggaggaataataatggaattaattaaaagagaagatataagaaatattgctataattgcccacgttgaccacggtaagacaactttagtagatgctttgttaaaacaaagccatacatttagagctaatgaaaaagtagaagaaagagtaatggattctaatgacttagaaaaagaaagaggaattacaattctttcaaagaatactgcagtaatttataatgacataaaaataaatatagtagatacaccagggcatgctgatttcggtggagaagttgaacgtgtacttaagatggttgattcagttttgcttgttgttgactcttatgaaggaccaatgccacaaactaaattcgttttaaagaaatcattagaattaggtttaaagccaatagttataatcaacaaaatagataaaccaaatgctagaccaacagacgttattgatgaagtatttgatctattcgtagaacttggagctaatgatgaacaattagatttccaaattatttatgcatcagctagagaaggctttgcaagatataatgtagatgatcaaaataacgatatgactcctatatttgatacaatattaaaatatgttgcaccaccagaaggatatattgatgaaccacttcaaatgcttgttagtacactagatacaaatgcatttgttgggaaaattgcaattggtaagatacatcgaggtacagtaaagagaaatcaaacagttgctttattgaagaatgatggatcaagcgctaattacaaaataactagtatattcacatacaaaggattaaagagagaagaagcagaagaagcttcaatgggagatatagttgcagtaagtggtgttattgatgctaatataggtgatactatagcagattcatcatcgccagaagcattaccattccttgaaatagatgaacctactttaaatatgaactttatggttaatgattcaccatttgcaggtcaagaaggtgagttcgtaacatcaagacatttaagagatagattaatgaaagaacttgaaacaaatgtaagtttaagagtaaaagaacttactccagattgttttgaagtttcaggaagaggagaacttcacctttcagttcttattgaaacaatgagaagagaagggtatgaattccaagtttcaaaggcaaatgttatatttagagaagtagatggccacaaggaagaaccaattgagtacttaacaattgatgttccagaagaatttatgggacctgttatggaaaagcttggaccaagaaaagcagaaatggttaatatgacatctgcagtaaatggatatacaagattagaattcacagttccagctagaggacttattggatttagaagtgaattaatgactgatacaaaaggtaatggaattatgaatcacgtattccattcttatgaaaaatacaaaggtgatattccaggaagaagcagaggatcaatagtttcatttgaagcaggagattcaatagcatatggattatatagtgctcaagaaagaggtcaattattcataggtgctggtgttccagtatacggtggtatgattgttggggtttctgcaagagcagaggatcttgaaattaatgtatgtaaaatgaagaaacttactaatacaagatcatcaggtgctgatgatgcattaaaattaactccaccagttgaaatgtctcttgaacaatgtttagaatttataaatgctgatgaattggtagaagttacaccaaagaatataagaatgagaaaaagagtattggatagtgctgaaagaagaagaatgattagcagaaacaaaaaataatttgctgaaaatactttaactattaaataaaataaatataattaaagtaaatggtctttatttggctatttacttttaattatatctaggagaaagtagaaaaagtttatgaataaatataaatcttttagaaagctaatactgttaattatattatttttatttgtaataactctgacgtttgtaatatcttatagtagtaccataagaaaaccattaaagtcgactgaagactcaattataattgaagtcaaacaaggcgaaggtttttatgatatattggataagttagacaaagaaaataaattgaccaataaacttcttattaaagtaaatctggctatagataagagaaaagtaaatttaacagaaggtatatatgaaataaatacaaattcatccttagaagaactgataaaatctttagaaaataaggatggggataaggatctggttaaattaactataccagaaggttattctatagaagatattgctaaaagcgtagaagataaaggtatttgttctaaagacgaatttattaaagacgttaaagattataaattgcctagtttcgtgaaaaataataataagaagagatataatttggaaggatatttgtatcctgatacatatttaatagaaaaagggtcaaatgcaaatgatgtaattaaatctatgttagatagatttgaagatgtgctgaagcaggcagaagatgagactaaagttgaaataagtgatgaagatgttgaaaaaatagttactatagcttccatgatagaaagagaagcaagagtgcctggtgataggccattaatatcatcagttatttacaacagattagagaaagatatgaaacttcaaatagacgcagccgtaatttatgcattaggatatcatgttgatgtagtattaaacaagcatctagaagtagattctccatataatgtgtataagtataaaggcctgccagttggtcctatagcaaatccaggtttagactgcattaaggcagcattgcttcctgaaaagacagattatttatattatattatgaaagatgatggatcgcattattttactaataactatgaagattttttaaataagaaaaaagagttgggatactaactgtaatgcacacaatgtacaatgcacaatcgatagatgtgaattgataatttaagttctaaagtataatatagagacttaattttggatatgtatagatttccaaaacaagaacttgacatatacccaatctaactcaagtaaattgaagaactaatcaaatgcataagtaaaattcttaaattgcttatctatagataaacaacttaagaattagatataaattataaatcaagttattgatttgtttatctataatacagatttatggaggaaattcatgagcgaaatcacatatgactatatggaagaatatattagaagtttaattcctgagagagaagggacattaaaggaaatagaagcttttgcaagagcaaatggggtgcctattgttcaaaaagaaacaggtgtatttcttgaattcatgactagtatgaagaaaccaaaaagaatattagaacttggaacagcaatagggttttcatcaatactaatgtatcaagctgctggaacagaaccagaaattgttacaatagaacgtgatgaaaaaatgattgaacttgcaaacattaatttaaagaaatttaatttagaccataagattaaaattgaagagggcgattgtttagagattttagaaaaattaaatgagccttttgatttgatttttatggacgcaggcaaaggacattacaaccactttttgccacactgtttgagactacttaatccagatggggtaatagttgctgataatgttttatttagaggtatggtggcatcacaagaattagttaaaagaagaaaaattacaatagtaaagagaatgaggacttatttggaattagttactcaagatgaaaacttaattacgtctgttataccaatgggagatggaattgcagttacaaagaggaggtaaattaaaatgataagaccagaaattttagcaccagcaggaaatttagataaacttaaaatagcaatagattttggtgcagacgctgtatatcttggcggaagcaaattaaatctaagagcatttgcagataattttactaatgaacaattaaaggaaggcgtggaatacgctcatgatagaaatcgaaaagtttatgtaactatgaacgttttccctcataatgcagatttaggcggagtagaagattatataaaggaattatatgaaacaggtgttgatgcaataatagcatcagatccagcaataatttcagcagctagagaagttgcaccaaatttagagattcacttaagcactcaagctaataatgttaactggagagcagctaagttttggtatgaacaaggtgttaagagaatagtaatggctagagagcttagcttaactgagataaaagaaatgagagataacttaccagaggaatgtgagatcgaagcatttgtgcatggttcaatgtgtataagttactcaggaagatgtttaatttctaattatatggttggaagagacgctaatagaggggcttgtgcgcaagcatgtagatttaaatatcatttggtagaagaaaagagaccaaatgaattttatccagtagttgaagatgagaatggaacatacataatgaattcaaaagacttatgtatgattgaacatatagacgatgttataaaggctggagtatactctctaaaaatcgaaggacgaatgaagagtttatattacgttgcagcagtagttaaatcatataggcaggcagtggatgcatatatgaaagatcctgataattataaattcgatccaaagtggatggaaaatttaaataaagtaagtcacagagtatatcatacaggtttttactatggccagagtggagagcaagtatacgaagattcagcgtatataaggcatgcagatataataggaatagtaagagcatacgatgaagaaacaaaaatagcaactattgaacaaaaaaataaagtattaaatggtgatacagtagaagttttaagaccagaaggagataatttcgaagttgttcttcatgatatgacagaagaaaacggaactccaatagagtcggcaaatagagcgaaaatgatatacaaagtaagagtagatattccactaaaagaaaaagatttaatagttaaagacaaagaatagtttatttaacgggaggttgttcctcttttgcttatccaaattttacgtttggagtaggctaaagtgggtgaaatctcccgttttgtgttttaagcaaaatttttatggtactaattaattataaatctcaagtgtatttgatatcggtaagttgtcacataaatttagatttagagttggatatctatatggataaacaacttaagaatttgatttatactttgcaataaataccatactagaaagtagaaacatttttatgcaacaggcattgaaaatgagctgttaaaatctctcaattgtaggttgttcaactaatgcttgtcacaatgaaattgggagcaagcattagtggtgcaacctacaatttagcactttcagcgaaattttcatagtcctgtgaaataacaatgtttttactttcggtggattattgcataagtccagatattttgaataaaacaccttatttaaggctagaatttaagctagagagggaggtgtttttcatttttactgaaaaatttgatagaaataagagattaattcagattctagctatgcttatgactgtaattgttatgttaacagcgcgtttaacaatattgcaaatatatccatctgaaagagttgtgagttcttatcaaaatcaccaagaagaaaatattagcaatatgaattatatgattttagacactaatgggaaagatttaatgaagtataacaaaaaatacgtacttgtcattgatacaagaccattcagtttaaataactatgaagaaacacttgaggatttaatggcgtttaatttcataatgaaatctgaaaatcctgattttagttattcagatataatgaaacaaagtgggaaattatattttaacatatcagaggatacatataataaaattaataacctaaaaaatataaaaggaatatatacttatatttctgatgaagtagatactaaaaaagcgtggagtgtcagcagtatgttatcaaaaatattagatgaggaacatgaagtaggaactcttgaaggtgatatgtatgattatctaaaagataatgaaaaacctaaaagcgaattttatttagataataaagctgtttatgcgaaacaatcagtaagtataagtgatgataataaaaatttaaaattaactcttgatagtgatattgaaaataaaataagagatattttggataaagaggaatattcatatttaagcaatgtaggggttactataatggaaagtgatacaggtaaaattagggcaatggttcaaaaggatgaaagtgctgctaatgtaaatttaggtatacagcagattggatatgagcctggatctatttataaagtgataacactcggagcggctttagatatggggcttataaatataaatgatacttttgttggagcaggtaagatagatagaaaagtatatggtaaattatcagttgagcaggcttttgaaaagtcttctaatgatgtatttgctgatataggagcaaaagttggctatgataaattaatggattactcacagaaattgggattatacgatagagtactaaatttaaatagtggaattgtaaaagaggcacaaggggtgaaaccagaagaggagtctggaataaataatatatctataggacaatgcatgaatgtaactccaattcaaatgctgggagctataaattccataactaataatggggtttatgaaaagccatacttagtcgaaggtattttggataaagatgataatttaataaaagagtttaaaactgataaaaagagagtatttagtgaaacaacagcaaaaatagttaagaatgaaatgaggcaggttgttttgaaaggaacaggaataaaagcgtatgaatcagatcttgatataggtggtaaaactggttcggcgacaggtagtgaaggtaaaactcatggatggtttgctggatattttagtgcaggaggaaaaaactatactatggtagtatttaccccagacatacagatggataaggatgctaataatgaagatcttggtggtggcgatactgcagcaccaatatttaaagatatagttaaaactttaaatgcgaagtagtgaaatttaatcactgctatattatatatagtgagataataaatttacatttagaattctagtgaactaagtggtaaattaagcttgtgatatagaaatttaattgcaatataagtgttctaaaaagattaattaataagaacatatattggaatatcggtcgctacaaaccaaataactttattaagagtgaattatatcatttagaacctatatagtaaaatataaatataaaaaataaaaatgtataagcaacttttttggtactccaacatattataatatcaagcactgctatggaggaaaaaggtgtttatattaaatagctttatagacctaatattaaattcactattcttaactggatatgtaacaaataataatacatttccactacctttagatgaaacagaagaacaaatgtatttgaaaaaatttaaagaaggagataaaaatgccaaaagtattttaattgaaagaaacttaagattagtagctcatatagtaaaaaaatattcgtttcctaataaggatgtagatgaattaatttcaattggtactgttggattaataaaagcgatcgattctttcgatgcaggtaagggtactagacttgcaacttatgcttctagatgtatagaaaatgagattctaatgctgtttagaaatagtaaaaagcaaaaaagtgaagtttatctccaagatccaatcggagtagataaagaaggaaatgaattttgtcttatggatatactaagcagtgaaaaagatagcgtcttagaaaaagttgaaagcaatttacaagttagagctctatataaaaagttgattgagtcattaaccaaaagagaaagtgctattataataatgagatatggattaattgatggaaaatgcaaaacacaaagagaaatagcagtaaatttaggaatatcacgatcatatgtatcgagaatagaaaaaaaagctttaaaaaaattaaaaaaagagttatttactaaaaattaatttagtgtatagagaattataaatctttatcactataaagcgatgcgctgctatttagtatataatatgtacttaataatatccattttcattcatattagtgtaatgttaaaagaagttggaaggataaatattctatatttatataaagaatattgacatactttaaaaaagggtgctatttttaatatagcaccttattttttataagatatactaataatttacttttttaaattacagatagaggagaaaacttatggctaaaatagacaacttattagatagaattgatctaactagcgcatcagatattcacttaacttcagaattgccaccaatggtaagagtagacggtgatttggttatcgcagatgaaaatgcagtaccacacgaagttgttggagaatatattagagatctaatgccaagtaaatatgaagagtttttagaaaatggagaaatagattttaaatataataagcctggtttagggaacttcagggttaatgcatttaaatgcaaaggtaattatgctatatgtatgagagttataaaggaagctataccaaagcttagggatatatcagatgcaccagttttaaaggatttcactgaattacaagatggattggttcttgttactggaccaacaggatcaggaaaaagtacaacacttgcggctatggtaaatgaaataaatatgactaaagaaaagcatataattacattagaagaaccaatagaatatatctatgaaacgaagaaatcaatggtaaatcaaagggaagttggacaagatacaaaaagctatgcaatgggacttagagcagcattaagacaagatccagatgttatactgcttggagagatgagagatcctgagacaattgaaatagctttaagagctgcgcaaacaggacatttggttttttctactttgcataatatgggagcagcaaatagtatatatagaattataaattcttttgaatctggccatcaaaatgaagtgaaaattcaactatcatcattgcttaggggagttgtttcgcaagtattattgccaaatgcttcaggaaagggtagaactgctgcaatggaaattatggtatgtacctctagtataaaaaatcttataagagaaggaaattttgagcagattaacagctttattcaaatgggctctaaatttggaatgcagactattgagatggatttgaaaagattagtaagtaataatactatatcgagggaagaatatgaaaaatggatacgaaataataaataaaaaataataattgcataaataaaaaaaggaatttgagtaaatgtgttgaatatattgcaattagtagatttttttctgcagagaagggaaagatttaatcatgcaacaagagataattacgtccttagattttggtactcaaaaattatctgctactgtagcgattagagagaaagacgaacttaaaattttaggagttcaatcatgcaaatcagcaggtatagagaaaggtttgttattagatattgataaatgcagggatgttgcagtaagcttattaaaggatttagaaaaaaagacgacagtaaaaagtgaaagaatatccattggaatttcttctaataaagtaagaattactgaagtatcaactgtagttaatattcaagaaaaagttacaagtgcggatataagaaaagcgctgaaaaatgcacaaagagattttattttaagtgacgatgaatgtatagtagatgtgcttatcaatttttatatattagataacaaagtaatacgtaaagatatattaaattggaaaggaagtaaacttgaaataaatcttacattagtaatagcagctaaaagtgaaatagaaaaatattatgaactttttagaaaaacagggtataatattgggtctataaaattgaatatattagtaggaaagcaagtgtttttgaatgaaaaaaattctatggaaagtatagtgattgcagacattggagctgggactactgatatagcattatttacggatggaattcctaaaagcataaattctattccaataggtggaagaaatataactaaggatttagcaatttgtgggaagttttcgtttttaaaagcagataatatgaaaaagatttactctagcaattataaagctttatatctagataattcgcttgaagaggaaattgaggtaggaactaccaaagtttccaggaaattattctatgaagtggtaaatgatagaattgaagaaatattaagccatatcaatataaaattaaaaaatactggtcattatgatagaatttgtagtataattctatatggagatggagttaattattttgaagatatagatgaaatcgttcgtaaaattttcaaaataaaaactaaagttataagaaaaaatgatctgggaataaaaaattcagaaaatataacttctatggctattgctaaagaagtatatgatagattaaatttattagaggatgataatataattctaactaataaacataatgataataaagtaattaatgaaaaagaacatttacacaataatgaaggtgaaaatcatattctaaaaaaagttaaagttttttttgataagattttttaaggggaggaattgttttgttagattttgagacagatatgcaagagttaaccaatataaaagttattggttgcggcggcggcggaagtaatgccgtaaatagaatgatagttgaaggactaaaaaatgttgaatttattgcaataaatacagataagcaagcacttatgctttctaatgcagatcaaaaaattcaaataggtgaaaagctaactaaaggactaggagctggagctaatccggaaataggaaagaaagcagcagaagaaagcagagaagaaataacagcttctataaagggagcaaatatggtgtttattactgctggtatgggcggcggaacaggaacaggtgctgcaccaatagtagcggaaattgctaaatctatggagattttaactgtaggagtagtaactaaacctttcccttttgaaggtaaaagaagaatgagacatgctgaaatggggatagcaacattaaaagaaaaagttgacacattagttataatccctaatgaaagactacttaatatggctgataagaaaacaacgctgttggattcgtttaagttagctgatgaagtcttaagacaaggtgttcaagctatttcagacttaattacaataacaggtgtaattaatgctgactttgcagatataaaagcagtaatgcttaataaaggactagctcatatgggagtcggtttcggtaaaggtgatactaggacacaagatgctgttaaacaagcaatttcatctccacttttagaaacatcaatagatggagctacagatgttattataaacttcactggaggagcagaccttggagcattagaagtatatgatgctgcggatgttgttcgtgaggctgtagatccagatgcgaatataatcgtgggagctgttatagatgaaactcttaatgaagaaattagaattactgttatagcaactggatttgaaagtgaaaataacagattatcattaggttctatagtagaagaatctaaaaaagttcaacctcaagttaaggaagttgcaaaagaacagcaagaagttgcagtagatgcaaaagaaccagaaatgacttctaacaattatgagccagatgatttagatatacctgttttcttaagaagacaaaagagacattaataacggaatttataatattaagaaataaagttaaatagaatgaaaatttgttttagggatcaaaaaactattaaatagttttttgacctttgatatgcaagttttcattctattttttttttttttattttttagtatattgtatttttatcagaaacttgtcagttacatcgagccacctgctgcttagaaccttcagagatattttcatagcttttcggaatcaaaatatttatgatttcggtaagttatcatataaatttagttttaaagttgggtatttctaaatttaaattacataattaaatttagaatagaatcacttgaattttattccacttatttttagcaaatttatataagataaaagaatttatttttacatattaagttagttttaaatataaaaaagagtacaaaaaaatatagtgtaaataaatgtaaaaagttcaattaaaaaaacaaaaagatttaatgtgattgtgacaaatttttatgagaaagaagtatataataaaatccagacagactggaggcgttgagatggaaatttatgttgataccttggttttggaaaattgcatagtaaatttctttttgttaacagtaactatgaaatgcataaagcataaatgtaaggtgattgcgctcttaagctccagtttattgggtggaatttatacattggttttagttattccacagttaaacatattatcttgtttacctattgaattaattgttgcgttcataatgctcagaatagtgtatggaaaaacaaacattcttaatatgatcaagattcttattatatttctaatgatgacatttactttaagtggagtatgttttctattttcattaaagcaaaatttatatttattaggaactacattcaaaatagagaagtattcaattaaatatattatgctaggagtaatgattatgtatataatttttagcagacttgtggaatacattagagacaagctgtttgtaaggaattttgtttttgagattgaattcaatatagaaggcaagcaatatagtattaaaagctttttagatactggaaatgagcttagagagccaattacaaatcttccatgtattttaattgaagaaaacctaataagtgatgtggattttaatagtatcaatacatatcatgtgctttacagttcaataggatatggaggaagtcttaaaggtataaaagttaacaacataaaaataagcaataattatcatctatatgaagaagtcgatgcaataatatgtccatgtaaagaaaaattaagtaaagaatgcgaatttaatgccttattatcaaggggaatagtctataagggggatatttatggaaaagttagttctgttttttaataaattattatgtaagttcaagttgtttagaaaaaaattatattatgtaggaggaaatgatgctctaccaccaccattatcaaaagatgaagaagaagatttggtaaataaattaaatggtggagatgaaaatataagaagtactttaattgaaagaaatttaagattggttgtttatatagcaagaaaatttgaaaacacaggtgtatatgtagaagatttaatatcagttggtactattggattaataaaagcagtaaatacttttaatccagaaaaaaagataaagcttgcaacttatgcgtctagatgtatagaaaatgaaatacttatgtatttaaggagaaatagcaagataaaagctgaaatatcattttatgaacctcttaatattgactgggatggaaatgagcttctgttatcagatatattaggaactgaaaacgatactgtttataatttgatagaagatgaagtagataagcagctattagttatggcattaaagagcttaaatgatagagaaaaagaaatagtaagacttagatttggtttaaatggaacaagagaaaaaacgcaaaaagaggtcgcggatatgcttggaatctcacaatcttacatttctagattagagaaaaaaataattaaaagattgaaaaaagaaataagtagaatgatttagcttgtcttcaagtataaaagtattgcctatcggagataatgtttaatgcaatggattattactttcgaaggggtgaatacttgtgataattaacaaagtagaaatatgtggcgttaatacttcaaaactccctatacttaaagaaaaagaaaagaagcagctttttttacaaatgcaagctggagataagaacgcaagagaaacttttataaagggaaatttgagattagtacttagtgttattcaacggtttaataatagaggagaaaatatcgatgacttattccaagtaggctgcataggcttaatgaaatcaatagataattttgatttgtctcaaaatgttaaattttcaacttatgcagttcctatgataattggggaaattagaagatacctaagagataataattctattagggtaagtagatctttaagggatatagcttataaagctcttattatgagagaaaaatttataaaagacaataataaagagcctactatatcgcaaattgcaaaagaacttgaattgccaagagaagaagttgtatttgcgttagatgcaatacaagatcctgtatcactgtttgagccaatttatcatgatggaggagatgccatttatgtaatggatcaaataagtgatgcaaaaaatacagatgaacattggcttgaaaatatttcaataaaagaagcaatgaaaaaacttactgatagagagaagcttatattgaatttaagatttttcaatggaagaactcaaatggaagtagcagatgaaattggaatttcacaagcacaagtttcaagattagaaaaaacagcactaaagcatatgagaaaacacgtataagaatgagagtttaataatattataatggtgggggataattatggaacttgaattacattcactcaatgctatgagaagtatggaagttatagatatattaacaggaactaaaatcgggtttataaaagattttaagatagactgcgatgaaaataaaatagttgcgttaatattaccaggagaaataaaatcatggtttgcaaaagaagatgaaaaagagattttgtggagcgatatagtaaaaataggaacagatgttatattggtgaaggcaaaagataaagaaaaagtaaatgcaaacaatgtatagccatatttcaaaaatatagttataataagtataggttttgatatacgaaagcaaagaggtgaatgaaagtatgaaatgtccattttgcggatttgaagaaagtaaggttgttgattcaaggtcaacagatgacaatacaacaattagaagaagacgagaatgtttaaaatgtaataagcgttatactacatatgaaaaaatagaggattttccaatcctagtaattaaaaaagatttaactagagaaaatttcaacaaagaaaaaataattaacggattaattattgcatgtcaaaaaagacccatatctagaaagcaaatcgaagaaatagcatatgatatagaaaaaacaatatctaatagtatgctcactgaaatcccatcaaatgaaataggggaaatggttatggctagattgaaagagttagatgaaatatcatatgtaagattcgcgtcagtttatagacaatttaaggatatagatactttcctagaagaaataaaaaatcttagaacataatcacataattaaggatgttgaaaagttttcaatgtcctttttataatgaaaaatgttatatataagttaaacttcagttaataaagatgccaagcagctaataaaatgttaatattaagtaaagaattaaaatgaattaaatggaacaagcattttattcttataaaaagtatctagctgtatataagaagatttcatggtggctttgtgacttttattttcatatacattattaaaaaagtattaatttattggaggattagagtgaatacattagagttgaaagacttagaaattaaagatgattttacaataataaatggtaaaaaatttgaaattatattcacaaatgcagaaaaaggaagaagttttaatagaaatacagaagagggagttagagaattaaattcattaaaaaaagaatttaatgcagataatataatatatataaagcaaattcatagtgatagaatattaaaatatgaaggtaatgggaaagatattatagatgaagagggagatgcaataataacaaatgaaaaaaatgttattattggggtttttactgctgattgtgtaccggttatattggtagatgaggaaaaagaggttacagctgcgatacacagtggatggagaggtacctttgagtctattacattgaagacaatagataaaatgaaaaatgaatttggatctgatgtaagaaatattaaggcttatataggaccacatattagaaaatgttgttatgaagtttcagaagatttaaagcagaagtttattgaaaagaaagatacaataaatgaaaaagagctatttaatggaaataatcttaatcttgaagcgtgcataatagacgatttaaggaaatctggaataaatgagagtaatataaatagtttagatttatgtacttattgtagtagtgatattaaattgcattcatacagaaaatctcagggttcctatggtagaatgttttcttttattatttcacgttaagggggaagatgaaatatggctaatgaaaaaattttaattgtagatgatgaagaacatatagttgaattattacatttcaatttagttaatgctgggtatgaggttttaagtgctaataatggtattgatgcagtgaaaatagctaaggctgagaagccgagcttgttattgcttgatttaatgctgccaggtatggatggatttgatgtttgtaaggaaataaagagagattctgaaatgaaaaaaacatcaataataatgttaacagctaaaggcgaagaacttgataagatacttgggctagaacttggagctgacgattatataacaaaaccattttcggtcagggaattacttgcaagagtaaaggcagttttaagaagaacaagctcatttaatgaggcagaagatgatgtttataattcagaaaatcttaaagtagactttgaacgtcatgaggtatatgtgaatgatagaaaggttgatttaactttaaaagaatttgaacttttacaaatactaataaagaataaaggaagaatactcaaaagggaaaccctattagataagatttggggttatgagtatataggagaaacaagaactgtagatgttcatataagatatcttagaaagaagatagaagaagacgataaaaatccgagatttattgaaactataagaggagtaggttatagatttaacccagcggagtaaaaatgaaaaacaaaatattaacttcagttattataactgtgctatttgcactattaattgtagcatcttcttttatcacaataataaatttagaacaaattaaaaatacaaaagaacaacttagaaacataaatttgctagtttctgaacttaatgatgttactgatattagtagaaatgattatgaagagttaaaagcattaaataatacgaaaataaatggtatagaagtaagatttactcttataaatgataatggagttgtcttatacgataatgagcaaaagagtagtgaaaatcatagggatagagaagaagttaagaaagcaatggaaactggtgaagggtattcaaagagatacagcgagacaattaagtcagacttaatatattgtgctactaggcttagcaataactttgtaattagaagttctgtaagcataaattctgttactataatacttaaagaaaatattaaatattgttttggaatattacttgtggttatgccattttctttatttctatcattaagactagttaaaaaaattgttgatccagttaaagagttagaaagtgtaactttgaaaatgactcatggggactataaaataagagccaatatcaatacaaatgatgaacttgggactttgggaaatagcttcaataatatggcggaacagttacaaataaagattcgtgaagttatagataatcaaaataaaatagaatcaatattaaaaagtatggaaagcggagttatagctgttgataattgcaatatggtaatttcaattaatccgtgtgcagaatctttacttggcattaaaaaaaatattgtaggcgaatgtttattagaccatataaaggattatgatataataaaattcttagaacaagatgatgtaagtgataaagaaataaaaatacgtcatccaatagaaagggatttcaaaattaagaaatcagctatggtagatggaatggaaggcgtaggaaaggttataacttttcaagacataactgatataaatagagtagaacttatgagaagccagtttgttgccaatgtatctcatgaattgaagactccgttaacatctataaagggatttgctgaaactttaaaatttgttaaggatgacgaaacaagagagaaatttttagatattatagataaagaagctgaacgattatcaagacttataaatgatatattagtgttatctaatattgaaagcaacttagcggttgatatgcatgagttcgaaccgggatcagtaattgaagaagtaattaatataatgagaaaaactgctattaataaaaatattaaattagaatttaaagataacaatagtgaaaagatctttggagatagagataaatttcatcaactagctttgaatttaatagaaaatgcaataaaatactctaaggatacttctggaaaagtagaagtgttaagttataatgaagataaatattattgcttaagagtaaaagataatggaataggaataccaaaggaagatatatcaagaatcttcgaacgattttatagagttgataaatcaaggaaaaaaggtggaacaggtcttggcttagcaattgtaaaacatattgttaaaatttttaacggagagatttatgttaaaagtgagcttggagtaggaacgtgttttgaagtgaaaattccatatttataacagataatgcgcaaagtggtagaaactttgcgcattttttaattattatcaaaggtatgttaaattttcttaacatccctctaatataacttaacaattctctaataatagattaactaaatgggtatattataggatatgtaataagaaacaatttaaccaacataatttatgtcgaatttattgatggagggaatttataatgaaaaaaagaacgttaaagttagtcgtaggggctttgttagtgacagttataggaagtgcaatggttgggtgtggaagctcatcaaataaatcagaaacaggtacaaagactgaatcaagcgataaagtaagtgggtctataaccctaagtggttcatcagccttacttccattaatggagcaagcgattgaaacatataataaggaaaatccagatgcagaaattagtgctcaagcaggtggatcaggtacaggtcttactcaagtactagatggatcagtagatgtaggaaattcagatatttttgcagaagaaaaattagataaagataaagcaagtcagttagttgatcataaagttgtagcagaaggttttggtgttgcggtaagcaaatcacttggaatagataatttaacatcagctcaaattaaagatatattctctggcaaggtaactaactggaaagaagttggaggacctgataagccaatattattagttcatagaacagcaggttctggaacaagagcaacattcgaaaaggtaattcttggtggagataaatcagcagaaaacgaatcattaggagtaactcaagattcaaatggagcagttttaagtgcaatgaaacaaaatgatggtgcaattagttatttaggtcttgcatatatgaacacacaagaagctaaggatgctataaaaatagtaaaacttgacggagtttcagctgaaaaagcaaatatagctgatggatcatataagttctggtcatggggacacatgtatactaaaggtgaagcaacaggagttgctaagagttttatagattatgttacaaacaaagttgataagtcagttctagataatttaggatttgtttcaggaagtgaaatgaaagtaaaataatttcaattaagggatgagtaaagatggaaaaaagaagttttaaagaaaggcttaaaaatgagtatttgggccaaggctttgcagggctatgtggaatattaataatagtgataacaatatcaatcatagtatttatagcttcaaaagggataagaatattcacaaaagatggatatagtgtcacagaatttttattcacaaataattggaagccaaacaagggtggagagccttcctttggagctctcgctttcatcttagggtcaaccttagtatcagtaggtgcagtagttataagtgcacctattgctattgctttggcgatatttgtgaatgtcatatcaagtaaatttgggaaaaagataattaaaccttcattagaagtattagttggaataccttctgttgtttatggttgggttggtatttctgtgttagtaccatttataaaaggaagttttggaggaatgggattttctttaatcgcagggattttagttttatcattaatgattttaccaactatagcaacgttatctatagatgctataaaaacaatacctcaagatcacattgaggcatcatatggtcttggagctacaagatggcagacgatttatagaataatagttccaggcgccaaatcagggatattaacaggtgtagtacttggtattgcaagggcttttggagaagcgttagcagttcaaatggtaattggtaacactgtaaagatacctgatagtatcacttcctcaatgtcaacattaacaagtataataacaatggatatggctaatactgtcggcggaacgccatggaatgatgcattatggacattagcattaattttacttgtgatttcttttatatttatagttattgtaagagtaattgagaaaaggagtgcggtataatgaatgcaaaaaaagtagataaaattgcgacagttatattttatataataagtatgttcatagtggttttacttggtgcatttattttatatattttatataaaggtggaagtatgttaaaaccgtcattcctttttggcaatccaaagcttacaggagcaggaggaggaatagcaccgcagttatttaattcgttttatatgcttgttatttctttggttataacaattcctattggggttggagcggggatttatttggcagagtatgctaaagaaggacctattcttaaatttataagaatgtcccttgaaacaatgtcttcacttccatctattgttattggtatgtttggattattggtttttgtaaatatggcgggatggggatattcaatacttgcaggtgctttatctgtgagtatattaaatataccttcaatgactagaatttcagaaaatgcaataaatacagcaagtaaaagggttaaggaagcatctttggggcttggagcaactagatggcaaacattagcgaagcttacagttccgacagctatgggagagatattaacgggtataatactagcagcaggaagaatttttggtgaggcagcagcatttttatatactgcaggattaagttctaaaaatttaaatttcaataccataagtatggctgggaacagctcagcattttcactttttagaccagcagaaactttagctgtccatatatggaagctaaattcagaaggcgcagtggttgatgctgctcaaatagctaacggaacagcggctgtgcttataatagcagttctcttattcaatgtttgtgcaaggttaattggaaatagattgatgaaagcttatagtgggaagtaggagatagttatgaatattatagaaacaaaagatttatgcttatattatggtgataatcaggctcttaaagatataaatatgtctataaataaaaatgaagttacagcacttattggaccttcaggctgcggaaaatcaactttcctaagaactttaaatagaatgaatgatttgattgagattgtaaaaataactggagaagtgttttttgaaggtaaggatatatataaggactatgatgatatatatttaagagaaagaatcggaatggtattccaaagaccaaatccatttccaatgtcgatttatgataatattgcgtatggacctagaatacacggcacaaaaaataagaagatcttagatgaaatagtagaaaaaagcttaagaggagcagcgctttgggacgagactaaagataggctaaaatcaagtgcgcttggaatgtcaggtgggcaacaacaaagattatgtattgctagaacattggcggtttctccagaagtaattttgatggatgaaccaacatctgcattagatccaatatcaactggaaaaatggaagaacttatggatgaattaaagaagaaatatacagttatcattgtaactcataatatgcagcaagcaggaagaatagctgataaaactgcattctttttaaatggagaagttatagagttcggaaaaacagaagatatattttataatccaagagataagagaacagaagattatattacaggtagatttggctaaaagggggcaatgataattatgacaaggggatcgcaggatacaagagtaaaaaatataaatagagagttgctaaaaatgtctagtctagttgaaaagcaaatatatgagagtttgctaagtttaaaaaaatatgatctagaaaaggctgagcaagttattaagaatgatgatattgttgatgatatgcaaaaaatgatagaagaggaatgtatcaaatttatagcaactgaacagccgctcgcaacagatttaaggagagtatttacagcatctaaaatagtgacggatttagagagaatggcagactatgcagtagatatatgtaagataacaaagaggattggtaaaaagataagctcatttgaaaaaggctcagaagaattatgggagatggacgataaagttagagctatgataagagcgtctgtagattcatatattaacgaagatgaggaaatggcatataaggtttgcgaaaaggatgatgagatagatgcattctataaatctttattttccactttgattaactcaataaaagtagatgaaaagctgcttcaagaaggaactcaattactatttgcaataaaatatctagagagaataggagatcatgtaactaatatatgtgaatggactattttttcaaaaacaggttcctatgttgatttaaatgaataaggtataagtattataaagtgtccttaatttattgaggacatttttatcatttggctatgaatttcttgacttaggtattatattaatgtaatatgaaaaaaataaattaaaagcataaaggaaatatatcatataattaaatgattcatagtagttaatcggaaatttaataagaatctagttaataattattttttattatttagaaaattataatcaaggcaaatctgtggtgatttttaaaagtagcagaaacatgtagtatgcgatgtggattttatttatgtaactaaggtgtaattaggtgtaaacgataaatttaagtataaaggggcaatggaagaatgacaagaggatcacaagatactaaagtaaagaatataaataggcaattagtgattatggcagacttagtagaaaagcagatatatgaaagtatgctgtgtttaaagaattgtgatatagaagcagcagatgaaattattaaagctgatgataaagttgatgaattacaaaaaataattgaagaacagtgtattaagtttattgcagcagagcagcctctggcaacagatttgagaagagtgttcactgtctcgaaaatagtgacagatttagaaagaatagcagattatgcagtagatatttgtaaaataacaaaaagaatcggcaaaaatgtgaattctcttaaaaaggtttcagaggatctatgggatatggaaagaaaagcaaggtatatgataaaggcatctatagattcccacgtcaatgatgatgaagaaatggcatatagaatttgcaaaaaggatgatgagatagatactatatatagatcgctgtttgcttcttttattaaagcaataaaaaaagatgaaagtttacttcaagaaggaactcaattgttgtttgtaataaaatatttagaaagaataggggatcatgtgactaatatatgtgaatggactgtcttttcaaaaacaggagcttatgttgatttgaatgaataggactatataatgtaggaaaatgttctttgttattaagaacattttttgttttgttaaatcatttatacaagaaatgaaatcctttgaagctattttttaaaaggtatgaataaaaaacattattattttatgaaattataatgaggttaaacatgttttaataatatgaattgttgacttaactaagggtttaatgtaatataacaaagataagaatgttataataaggggtgaaaaaatgaaaaatattataacaaaagtaacctctaatggaattgcagaggaagtcgggatagaagaaaatgatatcttagtatctataaacaataaggaaataaatgatatcatagattataaatttttatctgcagatgaagagattgttttagagatagaaaaacctagtggtgaaatatgggaaattgaaattgaaaaggaatatggtgaggatatagggatagaatttggcgggggaattatggataaagcaaaatcatgcagtaacaaatgcatattttgtttcattgatcagctgcctaaaggaatgagagaaacattatattttaaagatgatgattcgagattatcatttttacaaggaaatttcgtgacattaacaaatatgaaagatgaggacattgataggataataaaatatcatataagtccaattaatatttctgtacatacaacaaatccagaattaagagttcagatgctaaataacagatttgcaggtaatgttcttgaaagaatgcaaagactagctgatgcaggaattacaatgaatgcacaaatagtttgtgttccaggaataaataatggaaatgaacttaaaagaacaattgaagatttatataaactttatccagaagtctcagatgtagcagtagttccaataggtattactaagtttaggcaaggacttaaacatgttaatacgtatacaaaggaacaatctattgaggaaatcaataatattaaagaattgcaagatacatatattaaagaaactggtaagccatttgtgagattatctgatgaattttatttagtcgcagataaagaaattccaaatcaggaattttatgatgattatcatcaaatagaagatggtataggaatggttaggtgttttagagatgccatagatagcactttagatgacttggatttaaatatgaagggaagcttttctatagttacaggagagctggcgtataatgaattgcttgaagccagtaataaaattaaatgtaaaaatcctaagatacagcttgatgtctacaaaatagtgaatcattattttggagaaactattactatagcaggacttttaactggaactgatataataaatcagatgaagggaataataaatagtaagtatttaataatgtctaataacatgtttagaaaaggctacgaattatctgattctaatgagcagataatgctggatgatattaaaattaaagatattgaatcagctttagatgtcaaggtaatagtagttgactacacaggtgaagatttaatagaaaaacttaatgaggcatatgaagaaaaatagactagcatgctggcttgttatttttgaatatgtctaaatataaagaggaggaattttaatgggtaaaccgatagttgctatagttggaagaccgaatgttggaaaatcaacgttatttaataaattagcagggaaaagaatttcaatagttcaagatacaccaggggttacaagggatagggtgtatgcagaggctgaatggctgagatataattttactatgatagatacaggtggtattgaaccagagaataatgatattattataaaacaaatgagaagacaagcaaatattgcaattgagacagctgacgtaataatatttatagttgatggtaaagaaggattaactgctgcagataatgaagtggctactatgcttagaaaaagcaaaaaaccagtagttttagttgttaataaagtcgacaatttaaaagatgaaaataatgcttatgaattttataatttaggaataggcgatcctatggcaatatcagcagggcaaggattagggcttggtgatatgcttgatgaagtagttaagcattttgataaatctatttatgatgaagaagatgatgaatatattagaatagcaatgattggtaagcctaatgtaggtaagtcttctttaattaataaattgcttggagaagaaagagtaatagtttctgatattccaggaactacaagagattcaatagatagtcatttagaaacagaagaaggtaaatttattttagttgatacggctggtcttagaagaaagagcaaggtaaaagaagaaattgagagatatagtgttataagaacttacgctgcaatagaaagagcggacgtgtgtatacttatgattgatgcaacagaaggaattacagaacaagatgaaaaaataataggttatgctcatgaattgagaaaggctattatggttattgttaataagtgggatttggttgaaaaagatgataaaactttagataaatttaaaaaggatcttcaatcaaatttaaagttcttaagttatgctgaatacttattcatctctgcactaacaggacaaagaactaataaagtgcttaagttagcaagatattgctatgataattacaataagagaatttcaacaggtatattaaatgatgtcataagcaaagctgtacttatgaaggaaccacctattgttggaattaagagaatgaagatttactatgcgactcaagttgcaactaaaccgcctaaatttgtattctttataaatgatgaaagtgcaagacacttctcatatgaaaggtatttggaaaatcaattaagagatagttttgatttcaaaggaactggaatacaaattgaatatagacaaagaaaggaatagttatgagtaaaattacttttttaggaggaggaagctttggaagtgccttagctgttttacttgcagaaaaaaataatgttgttaatatatacgatagagataagaatgttgttaacgaaataaacattaagaaaacaaacgaaaagtatatgaaagattttgcaattcctaaaggagtaactgcatttaatagtattgaagaagcaatagatggtgctgattatatagttttatcagtaccttcccatgtaattagaagtatgtgtatagcgattaaagggaaaatccctagagatattccaataatatctattgcaaaaggtattgaggaagacacagataaaagattatcggttgtaattgaagaagaattagataatccagttgtagttttatcaggaccaagtcatgcggaagaagttgtgatgagaataccaactacaatagtcagtacatctaaagaaatgaaatttgctgctgatgttcaagatttatttatgacaccatattttagagtctatactaatgacgatataataggagtagaagttggtggcgctgtaaagaatgtaattgcgttagctgcaggagttatagatggtcttgggtatggagataatacaaaagctgcactactaactagggggatgaaggaaatttctagagttggaatagcacttggtggaagagcagaaactttttatggcttaactggtatgggggatttaatagttacctgtacatctatgcattctagaaatagaagagctggtttactaataggtaaaggtatgtctcttgaagacgctttaaaagaagtaggaatggttgttgaaggagtaaaagcttgtagagcattttatcaactgaaggaaagaataggtatatcaatgcctataacagatggactctataaaggattatttgaaggaaagaatgccaagtctattgttgatgaactcatgaatagagacaaaaagagtgaattattttaatatttatagtattggaatatgagtatactttaggaatttattttcaagttatttgtaccagctatataaaaaagattgattttttatatagctggttttgtattttcaaatgttagtaaattgtagtctaattaaagtcctcaataggttgtgtgaaaagttactttaaaaaaatatatatgttgtaattcacatttcacaattacggctaaaatttttgcaatgtcttcagagttattatgaagaattattatatatatagtgatattttatacacgctataaaaatagtagatcaattatgtttgaacatgttgtctactatttttttattcttttttgattatgcctaatgttaatgtttaattttaaagataggaattttaataatattttaatcatatatttagtgattagaattgtgttaaaattttttatttattatatttgtatattttaaataaagcatgaatatatatatattggaaaaaagaatatgggagggaaaaatgtggacaattttaacatatacaaagatatagccgatagaacccaaggggacatatatgtaggagtcgtaggaccagttaggacagggaaatctacatttattaaaaagttcatggatcttatggtaatacctaaaattgataatacttataaaaaggaaagagcaaaagatgagttaccacagagtggctcaggaaaaaatattcacacaacagaacctaaatttgtacctaatgaagcagtagaaataaatttaggggatgaaataaaatttaaagtaaggatggttgactgcgtaggatatattgtaaaaggagcattaggatatctagatggtgaggaaactaaaatggttcatacaccatggtatgattacgaaataccttttgaggatgcagcagaaattgggacaagaaaagttataaaagaccattcaacaataggattagtaattacaactgatggaagtataactggaatagatagaaatgactatgtagaaccagaagaaagagtaatatatgaattacagtcactaaataaaccatttattgtagttcttaatactaataagcctaattctcaagaaactaaggcattgaaaaaagaattagaagataaatataatgtaactgttcaagttatggatgtttataatatggaagaacaagatattgaggatttatttaaacacgtacttaaggaattccctgtaaaagaaataaatattgatatgcctgaatggttagaaaaattggaatgtaaccattggctaaaaaaagattttttcaacataattatgaacatgagtcaagatgtctctaaggtaagagacataaaatactgcttaaatgattttgaaaatgaagactttatgggaaaggcaaccataaatgaagttgatttgggtagtggaacagcaaaaatatctatgaaacctaaggatggaattttctataaggttcttagtgagatatgtaatttagaagttggttcagaaagtgacttgctcagcataataaatgacctaagtcatgcaaaatgtgaatatgataaggttaaagatgcattggaagatgtaagagagagcggctatggattggttgcaccacaactttcggaaatgaagtttgaggagcctgaaatagttaaacaaggtaataaatatggagttaaattaaaggcaagtgctccaagcttacatcttataaagtgtgatattaaaactgagataagccctataatgggatcagaaaaggaatcggaagaactagtaaaaggccttctagaacaatttgaaacagatccagcccttctttggcaaagtaatatgtttggaaaatctttagaagtgttagtaaaagaaggattacaaaacaagctatataaaatgccagaagatgttcaagttaagattcaaaagactttgcagaaaattattaatgaaggtaatggtggattaatctgtataatactttaaaaaatctgatataaagatttttataatttaatcctaacaaagtgttgattttatattgtagttaagtaaattagttatattagtgatactacatattaggcagaatcaagagaataacgagtgcatatgccaagcctattttcaagtacatggggggctcgcctcaatgcaatctatgagtaagtgattcacacttaaccataggtttgggttcttagatcacggaggcagagaaccccaataggctagatataagagaaatctgtttccatgtctaatgaaaataataatggtatcttgggcacgtttttctcgtatatgccttatgtattgtaaagtaataaaatcaacactttttttaccatgattttttatttaagtggtggaaaaatacatactactgggatataataaaagaaaggatataaatgaggggtattatgaaaagagagtataaagcttataagaaagttggtaaaattaaaatctctataagtgagctcttagagcttgatttacctagaatagtttatgcctctccaggtgttgtaaaccatataaaaaaaagacatggtaggcaattcacaaaaaaaatcaaggataatataatagatactatagaaaaagtgattaaagatccacaatatgttggtgtgaattataagagatcagttggtgactctcttgaattagttaagaaggttgataatattatcttacttttaggattggaagttgatttagaagatcaatatatatatgtcgcaactatgtatccaataacattatcaaaaatgaatgctagaatatataagggaagattaataaaagttgaagatagtgaattaaaagagaatatattataattaattttgaaataaattttgttttttgaggtgagaaaaggctcctcacgcgctagtcttagtaatcagagatgcaggatacgccgacctgccaaaaaataaattatattagagagattacttaacaatggtttaataaatagttgttaagtaatcttttgctatttatagaatactaggaatctttgattcctaagaatattttctcaattaactatttgcaaaaattagttgttgaagaacctatgctataatgttacgttctgtatatattccataaagaatattattttgagggagtaaattcattcaatacagcagtttcttggtctgcagttatagttccagcagttactaatgcatcaagtttagttttaaacatgtctttgtggtttccgccattgaaattaccttgtggttttagagcattttctattgatgtttccttttctgatgttaaagttccagctgttactaaactgtctaaagctgctttaaatccacctttttcattaccagaattagttaatgcagtttctattgctgtttgttcatctgatgttagagtcccagctgttactaattctgctaacttgttcttaaacatatctttgtggtctccgccattgaaattaccttgtggttttaaagcattttctattgatgtttccttttctgatgttaaagttccagctgttactaaactgtctaaagctgctttaaatccacctttttcattaccagcattagttaatgcagtttctattgctgtttgttcatctgatgttagggttccagctgtcaccaattctgacaacttattcttaaacatgtctttgtggtctctgccattgaaattaccttgtggttttagagtgttttctattgctgtttcttgatctgatgttagagttcctgctgtaactaatgcatctaacttagttgtaaatcccctaccttgcattctttggtgttgagctgttgatgtatcatttgttgtattagatgtgtctgctgcaaatacccctatactacttgatcctataattaggcttgctaaaatggctcctgttatgaccttactatttatgcttttacttttcatattgattacttcctttctaaaccttttttaataaaattttgtttattagcttttatctgccttaattataaagagctaatattacaattatgtcacagaaattagtaaatattgttacatattcctttgaattcaatcgtattaaaatatcatttgttatttgaattagcaaccactgcaataaggtatttctataaatgcataaataaattttttcataaatatgagacctttaaattttatataaagtgagtattctgtctagtttataataatgtacctttactagatacaattattttaaataacttgtcactaatcaagatagtatctttaattatgaaaaatattattggttatacttgtttttgcgtgatttcaagcaaattgatgacaaacggcaaaccgaacaacctttcactaatctctagtaaagaaatgaatttaaagttttataaggtttgtaaatataaatgttaacaatttgtgaacagaatgttgacatggaaatttattatgattatacttagttaagcaaactccaaattgtttaaaagttaaaaggaggtgtacagttgataaaaagtatgactagctttggaagggctcaaagcgaagatggaagaaagtcaagtttctctatagagatgaagagcgtaaatcatagatatttagatataaatataagaatgcctagaacgatgttggctttagaggagaagataagaaagataattagtaaaagactaaatagaggtaaagttgatgtttttattaattataaagcatatggaaataacattggaaaagcaaatctaaatatgaagttagctgaagagtattataaatgtttaaaacaaatccaaagtgaattgaacgttattgatgatatatctacaactaaaatagctaaatttccagatgttgttacattggaagagctggatgatgatttagatgatatttttagtgagatatcgcctctgattgaatcagctttagatttaatgaatgatatgagatgtaaagaaggcgaaaaattaaaagttgatattttatcaaaaattgagattatagagaattatgttgaagaaatagaaaaggtagctgacagtattcctaagaattacaagaagaaacttgaagaaagattggaagagttattatctggtgttgatatagatgaaagcaggatagcattagaagtggctattctttcagataaggcagcagtagatgaagagataacaagactcagaagtcatttaagccaaatgaaaagtacgttagatttagatgaacctattggaagaaaattagatttcataattcaagaaatgaatagagaagctaatactatagcatctaaatcaacagaaataaatatgactaacaaagtaatagagataaaaaataccattgaaaaaataagagaacaagttcaaaacattgaataattaggaggtaaaaaatgggaataaagttaataaacataggctttggaaatatagtctctgctaatagattagttgcaattgtgagtcctgaatcagcacctattaaaagaattattcaagaagcaagggatagaggtatgctaatagatgctacttatggaagaagaactagagctgtaataataacagatagcgatcatgttattttatcagcagttcaacctgaaacagtagctcatagattatctacaaaagatgatatggcagttgatgaggatgatgaataatgattactaaagggagaggtctattaatagttatatcaggaccatctggtgctggaaaaggtactatatgtaaaagatttatggagaaaaataaggatgtaatgttgtctgtatcagctactacaagatctccaagagctggagaagtagaaggtattaattacttttttatgtccaaagagcagtttgtagaaaagatagaaagtaatgacttcttagaatatgcagaagtgtatgataattactatggtacacctaaatctaatgttgaagaaatgttacaaagtgggaaagatgttattctagaaatagatatacaaggtgcattaaaagttaaagaaaacacaagagaaggagtttttgtattcatccttccaccatccatggaagagttaaaacaaagaatcattaacaggggcagtgaaaccaacgaatctctaatgaagagatttaaatcagcttataaggaaattaattttatttcaaaatataattatgcagtagtaaatgataaagtagagatagctgtagaaaaattagaagctataatatctgctgaaaaatgcagagtagatagaataaaagatagtatattagattcaaaggagggaattattcatgaacaactctatgattagtccatcagtagtagacttattagaaaagatacatgacagatattctttagtaattttaacatcaaaaagggctagacaaataatagaaggtgcagaacctcagatttcaataaaatcaaataaacctttaacaattgcaataaatgaagtggatcaagatgcagttgaatttgaaattttagaagaaggtcttaaataaaatgaaaaagaatttagtgttgggtgtaagtggtggaattgcagtatataaggcattagaaatagtaagtttacttgttaaaaaagatattaatgttaatgtaattatgacagaatcagctactaaatttgttaccccattatcatttcaatctttaagtcagaatatggttacatgcgatatgtttgcagaaccgaaagcttgggagattcaacatataagtttagcagaaaaggcagatgtattcttagtagcacctgctacagctaatataataggtaaagttgcaaatggaatagcagatgatatgctttcgactacaataatggcaactaaggcaaaagtgatttttgcgcctgcaatgaataccaatatgtatgagaatcctatagtccaagaaaatattaagaaattaaagtcacttggatatgaattcatagacccagctgaaggaagacttgcttgtggaacaagcggtaaaggtaaacttgaaagtcctgaaattattgttgacaaagttttaatggaattaaatgaaaataaagatttgctaaataaaaatgttgtagtaacagcaggtccaactatagcacctatagatccggtgaggtttattacaaatagatcaactggaaaaatgggttatgctatagcaaaggaagcacgaaatagaggagccaatgtaacattaatatctggaccaacatcaataatagctccaaaagatattaatgttgtagaggtttctacaaatgaagaaatgaaaaatgaagttatgaacatatttgatgaagcagatatagtaataaagtcagctgcagttgcagattataagcctaaaaattatagcacacaaaaaataaaaaaaggtgatggagagctttgcatagaatttattagagataatgatattctaatggagcttggaagcaaaaagaaaaatcaaattctagtaggatttgcggctgaaagccaagagttaaaagataatgctatgtcaaaactacaaagaaaaaatttagattatattgtagcaaacgatataacagcaagtgatactgggtttgcctcagaagataataaagtaataatcttgtctaaagaaggtaaggaaatttacttagataagatgagcaaagaaaaaattgcaactaacttatttgatattatacttgagaagcgctagaatttgcgcttcttttattaatattggaaatacttatacatatgatacgcaaatgaaggtagatgtataagtatgaaatagttctgattattagtttttatgtaataatcagaatgttaattatctaatattgaatattgttaatataagattagatgtgaggtggtaggtataaatatcatgtatgctgaaataattataaatagtgatgctttggagattgataagccatttacatacaaagtacctagcgaacttcaggataaaataggaataggatttagagttaaagtgccttttgggcctaaaagcagaccaatagaaggctttgtattttcaatattgcaggaagatgatttaattaatttcaattatagagtgaaagagattttaaatatatgcgatgattatgctatattaacaaactatgatatggaagtaattaaatttttaagaagaaagtatttatgtaaatttattgatgcaatccgacttatgattcctgttggaattatgaaggggttaagggaaaaaaagaaaaaagtagttttagtaaatgaagaaatacatgaggatcagcttgataaagaaaattataaaaaattatatgatttcgtagctagcaacaatgggatttatacaaaaacagaaattgttagtaatggatgcttttctttatacttattaaataagttaatagaaaaaggtatactaaaaacagaagaacaaacagtatttagatacaatactcgaatatatgatactgatagtaataagaaacttacaagagaacaggaaaactgtcttaatacgattttaaacagtcctgatcaaaaatatctaataaaaggtgttacgggatcggggaagacagaagtatatataagactagttgaagaaatgttaagtcaaaataaaagtacaattgttttagttccggaaatttcattaacccctcagatgattgaacgatttaagggacgatttggagaaaatgttgcgctttttcatagcaggttaagtgatggtgaaagatttgatgagtggtatagagtaaaagaagggaaagctaaattagttataggagcacgaagtgccttgtttttgccgcttcagaatcttggacttattataattgatgaagaacatgaaaatacatataaatcagaacataatcctaaatatcatactagagaagtaagtgagttcatatgtgaaattaaggactgtaaattagttatggggtcagcaactccgagcattgaaagttactataaagctattcgtggtgaatataaactaatagaaatgcataaaagaactaatgggaaagaaatgccgcatatggaaatagtagatatgagggaagaattgaagagtaagaatttatcattgttcagtaggaaacttttggctgaaatagaggcaactttaaaagataagaagcaggtaattttgtttctaaacagaagagggtattcaacatttatttcgtgtagaagttgtggatatgtattcaaatgtccagaatgcgatgtttctatgacgtaccataaaaatggatatttgatatgtcattactgcggaagggcagagaaatcaaaaactgtatgtccaaaatgtaatagtaaatatgtgaaattttttggagcaggaacagaacgcgttgaattagaagtgaaaaaatattttccgaaatcaagagcattaagaatggatgttgatactacacgacataaaaattctcatgaatcaatttataattgttttaaaaatggagaagcagacatcttaattggaacacaaatggtgtcaaaaggattagattttaaaaatgttacactggttggagttttagcggcagatatgtctttaaatttgcctgattacagagcttctgaaagaacatatcaaataataacgcaggttgcaggcagatctggaagaggtgaagatgaaggcaaggtaatagttcaaagctatacgccaaaccattatagtttaaagtgtgctcaagaagaggattatgaatctctatttaaagaagaaataaagattagaaggttgatggaaaatcctccttttggtaaaatattattaattgttggatcttcaaaatttgaagaaaaattaacaaaatttatgtatactttagaagccgatttgaaaaaattagtagtagatgatcttaatattctcggaccagttccttgtataatttctagattaaaagaaaattacagatggcagataataataaaaggaaattttgatgatgagtttagtgaaaaagttaaagatacactttatctattaaataagagtgtatataatgaaataagggttagtatagatattaatcctaacaatatgacttagggggaatacaaaatggcattaagaaatataagaaaatatggtgatgacgtactaagaaagaaatgcagagaagttgataaaatagatgatagattattgacattaattgaagatatgaaagaaacaatgtatgatgctgatggtgttggtcttgcagctcctcaagttgggatattaaagagactatttgttgtagatattggggatgggccactagtatttattaatccagaaataatagaaacaagtgggtctcaaatagacgaagaaggatgccttagcttaccaggggaaacagaagaagttatgagacctaattacgttagagctagagctttaaatgaaaagggagaagaattcgaaatagaagctgaagaattacttgcgagagctattttgcacgaatatgatcatttaaatggaactctatttatagatagagttaaaggtaggggagcttcaaaaaaataaatactgataggaggataatataatgaatatagtatttatgggtactcctgattttgcagttccttctttgcaaagaatgattaaagagtacaatgttactgctattttgactcaaccagacaaaccaaagggtagaggaaagaaaatggcgtactctgcagttaaagaagaaggattaaaacatgaaatcccaatataccaaccaataaagttaaaagatgatagagatttgatagagaaattaaaagagctaaaaccagattttattatagtagtggcatttgggcagattttaactaaggaagtattagatataccgaaatatggatgtataaatcttcatgcatctttgcttccgatgtatagaggtgctgcaccactaaattgggcaataataaatggagagaagagttctggaaataccacaatgcttatggatgttggtttagatacaggagatatgattcttaaggatgaagttgaaattactaataatatgacaactggtgaattacatgatatattaatggttagaggagcagatttacttgtaaaaagtatagagggaatttcaaaaggcgatatagtcccagaaaagcaaggaaatgagactttttatgccaagatgcttgataagaatatcgctaatatagattggaataaaagtgctgaagagattcataacttagttagaggactaaatccatggccaattgcttatactgattataagaacgaaagaatgaagatatatgaaacagaagttctaaaagaaaaaagcaataaagaacctggtactattatagatgtaagcaaaaatggagtgaaagtttcatgcaaggaagatgttctgttaataaaaagagtacagtttcctaatggtaagcctttgacaatagaacaatatattaatggacatgaaatagaggaaaatataatcttacaataatggagttgatgtataatgcatttttatccgttttctgatccaacaatgatattattagttccagctataataatttcattttgggctcaatccaaaattaatagcgcttatagcgagtatagccaagtaagaacaataaatggatatactggtcaacaagttgcaagaatgatgttagatgaagctgggctttttgatgttagaatagaattgataaattcaaaacttggagatcattacgatcctgcaagtaaaatccttagattatctccggaggtatattcaggtgcatctatttcttcagcaggcatagctgcccacgaggtcgggcacgcattgcagcataaagaaaggtatgctccactagtaataagaaattccattgtgccaattgtaaatattggctcaaatgtatcatggatgctattctttgttggtatattattaggttttaagggattaactacacttggaataattttattttcaggggttgtaatttttcagctaataacattaccggtagagtttgatgcatcaacaagggctttgaatatattaaagtcaagaggaatactatatggtgacgaaactaaaagtgcacaaaaggttttagacgcagcagcaatgacatatgtagctgcgacattaatggcagtatcacaattaataagattaattgctataagcaatagaagaaatgattagtaaagaggtagcgtatgaattgtagaaaattagcagtaaagatattaggaagagtcttaaatgaaggggcttactctaatattgtattagcaaaagagttaaatgaagcagaattaagtgataaagataaagcactattaactgaaattgtttatggagttttaagaaggaaaaaaacattagatattataatttcgaactttgtaaaagatcttaagttaatgaacaaagatatcttaaatattttaagagtagcaatataccaaatgaactttttggataaaatacctagctatgctgcttgtaatgaagcggtagaggaagcaaaagaaatatcagaaaatgattcaaagttagtaaatggaatacttagaaatttcactaaaaatcctgatgatattgaagttgtaggaaataaaattgacgaatatgcatataagttttcatttgaaccttggatgataagacttttaataaagcaatatggtgaaaatgtatcaaagaaaataatgtctggattaaattcaattccacaagtaagtgttagagtaaatgaacttaaagctgattatgatgaagtatttgaaaaattagaagaacttgaatatgaagttgaagaaggtgttatttgcccagaagcaatttgcataaaaggtggtaaatctatagaaaataatccgttattccaagaaggaaaaatcacagttcaagatgaaagtgcaatgattatagcaccattattagaattggaagaaggaatgacagttacagatttgtgtagtgcacctggtggtaaaactactcatattgctgaaatgcttcaaaacactggaaaagtattagcgtatgatcttcatgaatctaaacttggattaataaaagaaaattgtgagagattgggtataactaacgttgaagttaatacaagtgatgcaactaaattaaacccagatttaatagcatctagtgatagaatcttaatagatgttccttgttcagggcttggaataataagaaaaaaaccagaaataaagtggaacaagacaagaaatgagttaagagaaattataaaagttcaaagagatataatggaatgtgcatggatgtatttaaaagaggatggaataatgatatattcaacttgtacattaaataaagaagaaaatgaagaaaatattgagtggtttgttagcagacataaagactgtagcgtgaaaaagatctttattggtaaacaagataacttagtatacaatagagatggctctctaactattatgccaaatgaaaatatggatggattctttgtgactaaattagaaaaaagacaatagtaggtgaataaatgaacaatttgctagattttactttagaagaacttaaagcatggatgaaggaaaatggtgaaagtgcatttagaggtcaacaaatattatcatggatttataaaggtgttaaagaatttgataatatgaagaatataccaaagccattagtacaaaaactaaaagaaaatttttttgtaggtctgccaaagataatagaagtatataaatctaatatagatggtacagaaaagttcttgttaggatttaaggatggaaacttaatagaatctgtactaatgagatataagcatggaaattccatatgcatatccactcaagttggatgtgcaatgggatgcaaattttgtgcatccacaattgaaggtaaagttagaaatcttacaactggagaaattttatcgcaaattatggttgttcaagattatatcaatgaaaggatttctaacgtcgtattaatgggaagtggcgaaccacttgataattataataacgttataaagtttctagaaatagtttctgctgaatatgcattaaatattgggcagagacatataacattatctacttgtggaattgtacctaagatatacgaattagcagataaggaacttagcataactctagctttatcactacatgcatttagtaatgataaaagaaaagaaattatgcctatagctaataggtatagcattgaggaaatattagaggcttgcagatattatataaataaaactaatagaagaattacgtttgagtatgcgctagtgaaagacgtgaatgatggcagagaagatgcaaaggcattaggcaaattgttaaaaggtatgctttgtcatgttaatttgattccagtaaatgaaataaaagaaaatacatataagagatcttcaaaaaaggcaatagaagatttttccgaaatactaaaaaatcatggaatagaagttactacaagacgtgaaatgggaagtgacattaatgcagcatgtggacaacttagaagaagttacataaatacccaagaaatagagggggagcaaaatggtaggtttagttagtgatgttgggttaaggcgaacattaaatgaagactctgcttcgtatttagaaagagacgaattcaaaatttatgtagtggcagacggaatgggtggacataatgcaggagaagtcgctagtcagatggctgcaacaaatattgttgactatgtaagagaaaatttttcttcgagtagagcagaaaatttgcttgtagaagctatagaaaaagtaaataaagatatatttactttttctaacactagcgaaaatttaagtggaatgggaactactgttacaacttgttttatgactaaaaattttatacaggttgcaaatgtaggtgatagctgttgttttgcagttaaaaataatgaaattaagaagattactaaagatcattctttagtacaagaactagttgatattgggagtataagtgaaaaagaggcggaaaatcatcctaagaaaaatattattacaagagcattaggaactagcattaatgtgaatgtagatatatttcagttagagaacagagaatatgatctttatatattgtgttcagatggattgacaaatgaattaactaaagaagagattctacaagtcgtcactgaaggagaaagttatgtaaacattgctaataaacttgtatacttggcaaagcaaaacggtggcagagataatataacagtattgttgtttggaggagagatgtagcatggatggaattgtacttggaaacagatacgagttgttagaaaaaataggggaaggcggaatgtcagaagtatttaaggcaagagacaataaattaaataggtttgttgcagttaaaatacttaagaaagaactttgcgacaaccctgatattgtagaaaaatttaaaggtgaagcaacagctgttgcagccttatctgacaataatatagtaaatatactagatgtaggaacacaggatgaaataaattatattgtaatggaatatgttaaaggaaaaacattaaaagatattataaaacaagttggaaagatgaattatgaaacagctatatcagttgcaattcaaatagccaaagctttagattgtgctcatagaaacaacataatacatagagatgttaagccacaaaatattttagtaacagaagatggagttatgaaagtaactgattttggaatagcaaaatcatcaaattctgaaactattacaaatactagtacaataatgggatctgctcattatctttctccagaacaagcaaaaggaaattttattgattgtagaacggatttatattcattaggagttgtattatatgagatggttactggaaatctcccattccaagcagatactgctgtaactatagctttaaaacatcttcaagaagaagttgttccgccaaaaagtgttaattcaaagattcctgagagtttaaatcaattaattttaaagtcaatggaaaaggatcctattaagagatatcagaatgctaaagaaatgatctcagatctccaaagaataaaggatgatcctaatgcaaagatagataaagaagacgacaatgatcatactataataatgtctgctgtgaccgaacagatagcaaagcaagaggaaaagttgcctaataaaaaagatgatgactatgatgatgaagacgatgatgattattactacgaagacgatgaagatgaaaaaggcagtggaataaacaagaagagaataatgaaaataacaataggtgtagttttagcattattgttaatagttttaggtgttgcagcttttaaaatggttagttctgctagtgctaacagcaaagaagttgaggttcctaatatagtaggaaagaatgttgatgatggaaagaaagcacttgaagctataaatttagttttagtggaaggtggaactgaagcaagcgatcagccagaaggaactattcttaagatgaacccggatgctggaactaaggttaaagaaaaaagtcagattagagttattgtaagtggaggagcaacaaaacttaaaatgcctgatttgaaggagtatgatatagatactgcaactactattttaaaatcctttggacttaagattagtgataaaagcgaagcttttagcgatagtgtaccagagggacaaataataagtcaaactccgaaaaaagatactgaagtaacagcagatgataagataacagttgttgtaagtaaaggaccggaagttaagactacaaaagtacctagcgtagttggtaaagaccaagatacagctacaggcgaattacaagatgctggtttaaaagtatctgtaaattcccaagaaacacaagatgagagtcaaaacggtaaagttttaaaacaaacaggagaaggaaatagagtggagcagggaactacaattgttataacagttggtaaatatgttgcgaaacaagatccacctgtaactaataatcctactcaaggaaatactaagccgggtggaaatggaagtactcctgataaaaatactggaggaacaggtggtactactacggatacaccaggaaagactcctaatactccaggcacaactaatcctacaggcccatgggatgatacaaataacagtcaaaacaacactcaacctaaaacatcaaatcaaaaccatcaatagtaagtaaggagaggttcataaaagcctctccttctatgatatatatattgcaattcacaatgcacatttcacaattacggctaaaattcttacaatatttttagaattatgatgaaggattattttttgcaatatatatttatagttagatctacattaaatctctaaaaagaaaatatactatgatagaaaatactaatttagaaatttaatatattttgcaattaagttgctaagttctagttgtatttatgcatttggcttattaaaatcttaaacctaaagttatctaatttatcattgcagcatatattaacattctataaaagaatatataaatttattttataagttatggagggaaattatgaatggaaaaataataaagggcataggaggcttttattatattaagacagaccaaggcttaatagaatgcaaagctagagggaaatttagacataaggacataaaacctatggtaggggatgatgttacaattaagatggaacatggaaaaggcgttattgaagagatacatgagaggaaatctgaattggttaggcccactgtagcaaatgtttctttagcatttgttgtttttgcagttaagaatccagacataaattttgatttattaaataagtttttaattctatgtgaatataataacattgaggttatagtttgcttaaataagatagatttagtatcggaagaagaaagagaagaaataaagaagagaataaatgtcataggttatgaggttctctttataaatgctaaaaaaggaatagggatagagcggttagaagaaaagattagaggaaatataacagttttttgtggaccatcgggagcaggaaagtcaacattaataaacaagctttcaaacaaagaacatatggaaacaggtaatgtaagcgtgaagcttgggagaggtaagcatactacaaggcatagtgagttaattgaggtggcagatggatatattgttgatacacctggattttctacactagaaataaaggatttaatggataaaaattctttaaaatattgttttcctgaatttacacagtataatgataagtgtaaatacagaggttgtttacattataaagaaccaaattgtgctctaaaagaggctgtagaaagcgaaaagattaatagatacagatacgaattttatgtaagagcattagaagaaataattgaggaggaaaaaaataaatggtaaagattgcaccatcaatattatcagcggatttttcaaaattgggagaggacatagaaagaatagataaaggaggagcggattttattcatatagatgtaatggatggatcttttgttcctaatatatcttttggtttgccagttataaaatctattagaaatagaacaaagaaggtatttgacgttcatttaatgataaataatccatcaaattacatagatgcttttatagaggctggggctgatataattacaattcatcatgaggcggataaacatatagatagaacaattaattatattaagtcaaaaggaaaaaaagcagcaatttctttaaatccaggaactccaacaagtgtattgaaagatttaataccaagtttggatatggtgttgataatgtctgttaacccaggatttggaggacaaaaattcataccttattctctagataagattagagagataaaagaacttagcgatagattgaacccagggcttttaatagaagttgatggtggtattgataagacaaatgttaaagaggttatagaagcgggtgcaaatgtcattgttgcaggttcagcagtgtttaatggtggggaaattgatgagaatataaaagctctaagggggtaataatttgaacgttgcaattgtaagtggaggaaacccaccttcagagaagttactaaagaaatatattagtgaagttgaatttataatagcagctgataagggaagtgaatgcctttataagtataatattattccagacttgcttttaggtgattttgactctgccaaaaaggaaattttagataatatgaagttaaaggttaaggaagtcttggaatttcaaccagagaaagattatactgacactgaaattgcagttatggaagcgataaaaagaggcgcagaaaagatatatctattcggggcaactggaactagaatggatcatacactaggaaatataggacttatgctaactacgaaaaaaaaaggtgctaatttagaaatattagacgataataatagactttaccttggagaaaataaaatgaggttatacggcaaatatggtgaaaatatatcatttcatgcattaagcgataaagtaagcaaacttcaaattagtggtggaaaatacaatctaccaatttatgatttgggcttattagatccacgagctatatgtaatgaatttattgatacaccaatagatataacttatgaaaaaggagagttattagttattcattccatagactaaatattcatgaacttatttaattattttttatatttaaaagtggaacattttgagtagtaactgaatattaatataataagacggattaaattttcattttaatttttaatatattaatatttgggaggacttgtaaatgaaaataatagcttttaaactacctaagtttctatctaatataataaagttttttagaaaaaaaggctagaagtacataaggtataatttagttttaggctttctaaatagctttaggcgtaatcaaaaaaaataacaagtccatctgccaaggaaagttccttgttgcagcatagctgctcttttcatcatgcttcatcaacagattgaactaataggctcgctatgagcccgatctgcttcttcgcctgatgaaaaataaccatggcattttagactcgttattttctttacatatgccttaaaaataaaaaatgcaattgggataacaattgcattttttattatgaacttatattgctctttgaacctttccagatctaaggcatcttgtacatacatgaacagtttttggtgttccgttaactaaagcttttactttctttatgttaggagcccaagttctctttgattgacgatgtgaatggctatagcttactccagctacaacacccttatcacaaatttcgcatcttcttgccattagaaaacacctccttatattccaaagataatcatcttcaataggacagtgtaaattatatcataggaaaatgtaataggcaagataaattattaattataaattaaaaattatgtattggcagttaatatgcggctttacagcgaaaatgaaacttatgtgaatacctgccgaaatttgatatgtattatgttgtaattcacaattcacaattacggccaaaattcttgaaatatttttagaattatgatgaagaattatttttgcaatatatatatttatttcataggtaaattattctcttgattatgttttaaaaactttttggaaggaaagactttgtagagatagatttttaaagaagagaaaaacttttagctttagttcgaagattttaattgtacttggcactagttttgtatgtgaatgttttatttaaaggtaaaaagatctttggttatgctgtgtattttaagagagggaaaatgatatatatgtacattatatttgctgaaagtagaattatattaattgaaactcatgcctattttccagtcaatagattttagttttatttaataaatttcaagttgtgttttggatttgttttatatgtgcatgattttttgattgaaatgactatggttttggtttgagctttttataaaggtaaatgattgtaattgcacttcgtgctctttttaaagggaaatggtcttaattgcgctacgcgcttttctttggaaaaatgatcttggctggagttagtactttttaaggaaaggatcatggttactcttgataagttccgaattgtgatttgcactcttttcatatgtgcgtgcttttttataaatttgtgatcttgattttaatttgtactttttttaggaaaaatgatcgtaattgcgctgcgcgctttttttagaggtaaatgatcgtaattgcacttcgtgctctttttaaaggtgtatattttttgaatacttgaataaaatattgttctaatatagaatagaaaataagatgtaaatatagaatagaaaataagatataagaatttaggaggaatatggatggttggattttcaagcgaaaatggtaatataaattattcagaggaagttatagcaaaaattgttggattatccacaatggaatgttatggagtagttggaatggtttctagaaatgccagtgaaggcttttgggaacttattggtatagaaaattttagtaaaggtgtaaagatacagctaacaagcgagaagaaattacaaatagaattatttgtaatggttgaatacggaacaaagatatcggttatatctaataatataattcaaaaagtacgctatagtgttgaaaactatacaggacttaaggtgtcgtccataacagtaaatgtgcaagcggttagagtttaggaggttaaactaaatggaatatacaaagataaatggccatgatttttataacatggttgtgaatgctagcaataaattgctagagcaaagtgatttcgtaaatgcacttaacgtattccctgttccagacggagatactggaactaatatgtctatgacgtttaaggcagcagttaaagagatagaagatatggatagtgattctataggggaaatatcaaagaaattagctaaaggtgctttaatgggagctaggggtaactctggtgttatattatcgcaaatacttagaggtttttctaaaggcctagaaggaaaaaaagaagtagatattaaagagtttgcagtagccttttcagagggatcaaagtcagcatacaaagcggtaatgagaccgactgaaggtactatactttctgtaattagagccgctgctgaagcagcagtgtcatctgatgctaaggatatggttggctttatggaagagataacagttaaatcgaaagaaatgttagatagaactccagaattattacctgcactaaaaaaggctaaagtagttgattcaggtggaatggggctttacattatacttagaggtatgtttgaagcattaaagaatgatattaaagctgaattaagtgatataaaaataagtggcgcaaatggtactttagctgaatctacagaagaaattgatataaagtttgggtattgtactgaatttataatacttggtgacgccaaacgtgcacaagatttccaaaatgagatagagagccttggagattccatgatagttgttggatatgatgatgttataaaggtgcacatacatactaatgatcctggattagtcttatcaaaggcagttgctataggggaattatcaaagataaagattgataatatgagagaagagcacagagagctattaataaatactaaggaattaacagaaacttcatctgaagatgaagttggtgatggtgaaaagaaaaagtatggctttataacagttgctatgggagatggaatttcaaatatatttaaggacttgggaatagactatgtcattgaaggtggccagacaatgaatccatctactcaggacattttagatgctgttgagaaaataaatgctgaacatattttcattatgccgaacaataagaatataattatggcagcaaatcaggcggcagaaatatcaagtaaaaatatattagtagtacctacaacaactattcctcaaggaatagcatgtgccacaatgtttaaccatgattctgaagttgaagaaaatttcactaatttaaaggatgcaattgaagtagttaaaactggttcggtgacatatgcagtacgtgatacagaaattgatggaatagatattaaacaaggaaatatgttaggacttgtagaaggtaaaataaaagaggtaggcgaagacaagaaggttgttgccggtaaagttctagaagatatgatagatgatgaaagtgaacttattactgtatattatggtgaagatgtaagtgatgaagatgcaaatgaattcgaagttgagctacaagaaaagtacgacgacttagatattcaattttacaaaggaaatcaaccactatattactttttaatatcagtagaataagaaatagtaagggcgcctaatgctaggtgctcttattatttagggaggaagagaagggctttggatatatatagcaatatttcaacattaaaaggagtaggcccaaaggccacagaaaaattaaatagatgtggaatttttaatatactagatattctgttatattttccaagagattatgaatttgtagatagtaatgtggaatttgaaaatattacaggagaagacaagcagattttaaagtgtaaagtcattagatttagaagcgatgtaaaaactaaaactggtaaattattaacaactgtagaatttgactataatggacataaagtatctggaaagtggtttaatcaaaggtatataaaaaactcctttaaaataggagaaatatataatttgatgggtaaatttaaaagggtaggaaatactttagaggtggttaatcctatggtcacatgtgaagaagctatttctaatgagatcatacctaaatatcctttaaaaggtgatataagcaataagttgtttgaaaaattaattaatgaaattttgtccaagatgacagttaaggagaatttaccacaaaatatattagataaatattatttgatttcattaaatgaagctattagaagcgtccattttcctgataataaggaagtgctggaaaaggctataataaggcttaaatttcaggaattatttacatattcactaaagttactacttcttaaacataaaattaagaaaaacaaaaatggtatactttttcagtgggtagatgaacttagcttatttaaagagaagttaccatttcctcttactaatgctcaaacaagagtcatacgtgaaatattgagagatcaaaaatcaaattcatcaatgaatagacttatacaaggagatgttggtagtggaaagacaataattgcacttatagctatttttaatgtgatcaaaaatgattaccaatgtgcatttatggctccaacagagattcttgcaaatcaacactttgaagaagcaaggaaagtttatgatgaatttaatatagaaatcgaattattaacaggaacaacttcagtaaaagaaaagcagaggatcaaagaaagaattagaactaaagaaccaattttagtgataggaactcatgcacttttccaagatgatgtggaatttggaaagttagggcttatagtaactgatgagcagcataggtttggtgttgagcaaaggagtaaacttataaacaaaggaaaaagggctgattgcttagttatgacggctactccaattccaagaacattggcattatacttatattcagatcttgatgtatctataattgatgagctgccacctgggagaaagaaaatagatactagattttatgctgataatcaaagagatatagcttatgatttggcatatgatgagataaaaaaaggtcgacaagtatatattgtatgccctcttattgaagaggatgaaaaagaggagttaaattcagtagaaactttatataataaacttaccagtggaatttttaaggaattaaaggttgaaatacttcatggaaagatgaaaggctctgaaaaagatgaaataataaaaagatttaagaataatgaagttaatgttctaatatcaacaactgtaattgaagtaggcgttaatgttcccaatgcatccgtaatgattgttgaaaatgcagaacggtttggattgtcgcagttacatcaattaagaggaagagttggaagaggtcagtattcatcttattgtatattaatagcaaaggctaaaagtaatgtgactaaaaagaggatgcagataatgacagaatgtagtgatggatttctaatatcagaaaaagatttagaactcagaggtgcaggagagatgtttggtaagaagcaaagtggtgatgaaggctttgtacttgcaaatctttatgatgatatgaagattttaagatgtgctaaattagaggcgaataacatgttacaaaacgaatttgaggtaaatagggaaataattaatgaacttagtaaaaatttggaaaaaagtagtaaatatatttgctttaattaatttgaaatattatgtatagatatgttaatatataaaatatacacctatgaaaagagcacgaagtgcaattaagatcattttgcctatgaaaagagcacgaagtgcaattaagatgattttgcatatgagaagagcacgaagtgcaaccaagattatttcactttaaaaagagtgtgaagcttaattgggaacttttcacatatgaaaagagcacggagtgtgcaactgagtttagttttaaattgtaaattaaaaatctagagagtagattttcttatatgcttattttaggaggaataaaattttgagaataatagcaggaagagcaagaggacataaattaatacctccagctacaatggaaacaagacctacattagatagagttaaagaggctatgtttagttcagttcaaatgtatataccagaggcagtagttgtagacgtttttgctgggacaggaagccttggattagaagcggcaagcagaggggcaagtgaagtttatttatttgataaaagctctgtgacttttcctttattaaaggaaaatgtagaaagccttaaatttcaagatttctgttttcctatgaatatagatgcttatgaaggcttaaagaatcttgcgaagaagggaaagaaatttgacataatatttattgatccaccttattgcaaagaaatgattccagaagctatgaaaattgttaaggataatgaaattttaaagaatgatggaataatagttactaaaatagataccattgaagagatttatgaagggtataaagatataagattaacaaaaagtaagaagtatggaaatacaacagtatgttattacaagcatgaggagaagtaaacaatgagagttgcagtgtaccctgggagctttgatcctataacaaatggacatctcgatattataaaaagaggagcaaaggtctttgataaagtaatagttgcagtattagttaatgttgataagaaatatctttttgaaagcagcgaaagagttgaacttataaaaagagtgacaagagatattgagaatgttgaaatacgaagctttgatgggcttttagttaattttctaaaagaatgtaagactaatataatattaaagggattaagaacagcttctgattttgagtatgaatttcaaatggcgtttattaataaagaattagatgatgataccgaaactgtatgtatgatgtcatcggctaaaaatatacatattagttcctcaactgttaagcaggtggcaaggtttggaggagatattagtggacttgttcccaatgaaattatttcagatataatgtccagaataaatctataaatggtgattttttaaggaaaagtattttcataattagaatgtgctgtgtttaagcagccgcattgacttaaaattaatgatattaataatactaaaaacaattaaaaatactagattaagatttgttcctggtattttgatcatttatagaataaatatctaaggagtgtttttatggaaaaaatggaggtaaatataatagagttattagaatatttacaagacttggtggaaaattcacctaaagtgccaatgagcggtaaagttatgatagataaaagagaagttgttgatgtaatagatcaaataattaactatatgcctgatcaatttaaaaaagctgaatgggttatgaacgagagagaaagaatccttaatgaagctaaaaaagagtatgattctgttagaaaagaaacaatgactatgatgagacagaatgtcgagaatcacgatatagtgagggaagccaaggggagagcacaagaaattatagcctcagcacagagagaggccaaggctataagattagggtctagggattattctgatgaaatattaacccaattagatcaggaattagaagaacacaaaataaaattaataaaaagccttcaagaaagttttgaagtagtagctaaagagatagatacaaatttaactggtacatgcgatgttataaaagagaatattaaagaattacgcggtatgaaaaaataatttcaaggttctattaaatatacttaataaaagtgttaataacagtatagttaatgcaggatatatatatacaaataaacttgaagaatggctcatttgtaagtttgatgtataaatacttgtaggaaacactttgcataacccgtaagttataataaaactaacgattccttggattacttttaaaaaaatatatctgctataatttatcttagtatcgcttacgaaagaacttacttgtgcgattaccgcaagaccagaaaatgaagttaaaaagcttattataccaagcttcaaggggatagaaatttctaggggagagattatactgcacccattagtcatttcaatgcttcctaaaaatatactgtataaagtttgggaaggcagttttaaaacattatctagctgcctaaatgcaatatgaatataaggattgtttttaacaagagatataacaactgaaaaaattattatgaaaccacctatagataatgtggtgtttattccgttttgaactgcattttttacagcattaccgaaattcatactttcatttttaggacaagggagagaacttagagtatttaagtttctctttttttttgtcaaaaatcccattatgattattgataaattgcttcctagaagcaagatataacctaaggatacattccctaataaagttccagcaacagatccgattaaaaacaggggaccaacgttagacgctatgtttaaaagtctttcgtattcattcctatctatatattccatcttgtataaatctacacaatatttagcacctaatggatagccacatagtatacttgctacgattggaaaggaacaatttctagaaaggcctaatggtttgcagattaatggcccaagaaatttagaataaagatttattccatcgtagtatattaataaattacatataactacaaaaggaaaggttgttggcaatattgagttataccataatttacaaccatcaatagctgcgactatgcattggtttatgtttaaaacaaaaagaactattaagacggatataaatatacaaatgatagtattttttttgatattaagttgtttgattaaaataaagattaagctaataataagaaaccataagataataatatatatcatgaaatcactccaatcaataatatttatattctcatggttatgtaaaatattactatattataaaaggcccttttaaataatcatccataggacttatttttggatttagcagtgaatatgcttttgttcctaagatatctatttttagatgatcacattgattgtttcttggcacctttgttattagatttatactagaattagtttttatactctttagaattctttgccctgtagaattaaaagcaagaactcttgcgtaaggcgcagggctcttagataagcttgataaatcaaaattttcaaggttcaaaaagctttgcaaaagaattctacttatcctcgtgtatgtatatcttttgctttttgaattcaatattaattcgttaagtgaattggatcttacaatttcttttaatattttattatctatgccctctgatacatctggcaaatttaaaagagatctttcgttagtgagtaatttatattttatatatttaaaggtatcttcctcaaaaataaaaggatagttagaagaagataaactaagcagaatgtcatagctcgccgttggcataatatcagctaaatcatttaaagatttctcttttagatgttttcttattgatgtagcagaagcaaatgaagcgcttatgttgacatcgttatataatgaaccttctcttttgatggttttaggaactattgcgctatttaaacgaattagagattttatatattcaatacctaagatattattagaatttgatattgtatctaataatttatttgagtttaaataatctttaagtgcatttgctcggctcaaatgaaaaggtaagccagagtccaaattatattttaaaagttttttataatttaaaggctcggaaactaaaactttggctatgtcttctaatatagatacatttccttcttcgcttccaaagtataagtgatctattacgcctaacgagttaagaagagatacgcttccgaaagcaaaatgttcagcagaagaaatggaataaactagaggtagctctagaactagatcaacaccatttttaatagccatttcagctcttttccatttatctataattgccggaattcctctttgcataaaattaccactcattacacaaactataccatctgcgtttgtgtcagattttgctttactaaggtgatattcatgacctttatgaaatggattatattctgtaattattcctgtaagtattaaaatcatctcctttataaagctagtatagcatattatggaattttataatattagttattaagagtttaatatgttgtgcattttttttgtaaaatatcaataagatattataaaattattgttaaaaaatatacttttttaatattactctattaaaaagtagtttaaaaaatattcagaacattaaaagaatggtgaatttttaattattgcttaatattggcaagaaaatagattatatacagctagttgaatgaatatactatagatttttaagaaaaagttaatgaaaataatatgaaatagacatgtatttttcatatattaggtcaataatttaaaacatttgatagcgtttaataataaattataaaataattttaaataaaatttaattgttaaaaattatacttttcctatattgttattttacaggagtattgtctgacaatttagattatttcaaatctaaagacttctattttatagagaatttgtgttgaaaaaagcactgataaaggagtatattagtattagagataggatatagagaggagataaatagattatggaccttatgaaaaaaatatggactgcagcacaatcaaataaacaaaaaattgttcttccagagggaaacgaggaaagaaatatagcagctgcagaaaaaatacaaaaattaggattagcttacccaattttaataggtaacaaagaagaaataaataataaggcaaaggaattagatgtaaatttatcaggaattgagattatcgatccaaatgaatcagataaattagaaaagtatattgaagccttctatgaacttagaaagacaaaaggcgttacaatggaaaaggcagataaaatagtcagagatcctctatattttggtacgatgatggttaaattagatgatgcagatggaatggtatcaggagcaattcacacaactggagatttattaagaccaggattacaaattataaagacagcaccaggggtatctgttgtttcaagcttctttataatgcaagttccaggatcatcttatggtgaagaaggaacattaatattctcagactgtgcagttaaccctaaccctaacgaggatcaattagcagcaattgcaatagctactgcagaaacagctaagaatttatgtaacatggaacctaaggtggcaatgttatcattctctactatgggaagtgctgataatgaattagttgataaggttagaaatgctactcaaaaagcaaaagaaatgagacctgacttagatatagatggtgagctacaattagatgcagctatagttggaaaagtagcggctcaaaaggcaccagaaagtactgttgctggaaaagctaatgttttagtattcccagatttacaagctggaaatataggttataaattagttcaaagatttgcaaatgctgaagctattggacctatctgtcaaggttttgcaaaaccaatcaatgacttatcaagaggttgtagctcagatgatattgtaagtgttgttgcgcttacagcagttcaagctcaaacaaacaaatagtaagtattatttttacagataatttaaagtaagttagcttatagattgttaaaacaaaaatacaaaaggtttgaatgttaaaaggagagtagagttatgaaagtattagttataaattgtggtagttcttcactaaaatatcaacttattgatatgagtaatgaagagtctttagctcaaggacttgttgaaagaataggaattactgggtcaatattgactcaaaaagttgaaggaaaagataaatatgtagttgaaacgccattaaaagaccatcaagatgcaatagaacttgttttaaaatgcttagttgatgaaaaccatggtgtaataagttcaatggatgagatatcagctgttggacatagagttgttcatggtggtgaaaaatacgcaacttcagtagtaattaatgaagaagtaattaaggcacttgatgaatttacaaaattagcaccacttcataatcctccaaatataattggaataaatgcatgtaaggctcttatgccaaaaactccaatggtagcagtatttgatacagcattccatcaaactatgccagaaaaagcatttatgtatgctcttccatatgaattatatacagaagatcacgtaagaagatatggattccatggtacatctcataagtatgtagcaggtgaaatggcaaaattgatgaataaagacataagcgatttaaagatagtaacttgtcatataggtaatggtgtaagtattacagctgttgatggtggaaaatctgtagatactacaatgggattcactccattagatggtattataatgggatcaagatctggaagcatagatccagcaatagttacttatttagtaaaagaaaaaggatattctatagatgaagtaaatgatatcttaaataagaaatcaggggttctaggtatatcaggaataggaacagattttagagatattagaagtgctgtggaaaatgataatgatcctagagcattacttacaatggatatattcggatatcaagttaagaagcaaataggtgcttatgctgccgtaatgggtggtgtagatgcaattgtatttacagcaggaataggagaacacgctccagaaataagatcaagagctttaactaatatggaattcttaggaatagaagtagatttagaaaagaacgaaagtcataatatcggagatggtatggaaatttctaaagaaacttcaaaggtaaaagtagttgtaatacctacaaacgaagaattaatgattgctaaagaaactttagaattagttaagtaaggcataattgaaaaaatggtgagttaacatgctgattggtttttatttataatttatcagcatgttttttcaatagctttatacaatatatttggctgtacttcctttatagaagaaaatatatacgtaaaggggagcagttagtatagatacaaaaacatttgtatcatgagtttgttattttctttcatatggagaaataggaatttataataaatttcttgactttttagcacgcaatttatataattagttgtgtttgttttataaatatatgtgctaaggagtgaaagaggagatattatatagtttacattagttttattatatgattatcctgtgattttatgaaagtacaaatttcagatattatttcaggtaaagatagaagcaagaaaattgactatatatttgatgcaccgcaatttgattttgaaggagatataattaaaccaataaaaccttttgaggttgttgggaatatcttatcagatggtgatatattaatattgaatgctaaaatcaaaactgatttagaaatgatatgttcaagatgtttagatacctttatctatccaatagatattgatatagaagaaaggtttacaactaatagagatagtggtgatgatgaagctattgttgtaatggatgatgttttagacatcacagaaattgtcgaaagtagcataatttcaacactacctattaaaagagtttgcaagaacgactgtaaagggctttgtcaagaatgtggatgtaacttaaatcacaattcatgttcatgtcaaaaagaagatgtagatatacgttttgaggccttgaaaggtttgtttgataataaggaggtgtaatgaatgggttgtccagcaagaaaatcaggaaaagctaaagtaaaagcaagaagagctcaaacttttaaagctagtttacctggcatagttgaatgtccacaatgccacgaaatgaaacttgctcatagagtatgtaaaaattgtggttattataaaggtaaggaagttgtagcttctgaaaaataaaagaaagtctttatgactttcttttcttatataaagaaatatatatagatatatgttgtactattagatttatacttaaaacttcttagcgaaattttcatggttctgagaaataacgatgtttctactttgggtttattatcacataagtataagttaaataatctttatctaaaaaagaaaatattctatttattaattaaattaatttatttataattaaagtggaagaagggaggtattcagatgaaaatagctatagatggcatggggggagataatgcacctgtagcagtaatagacggtgctattcaagctcttaaggcatatgacgatatccaattatatattacaggtccagaagaggttctaaatatagaattagctaaatatacttatcccaaggaaaaagttattgtggtagatgcaaaggaagtaatttcacctaatgagcatcctgttatggctttgcgaaagaagaaaaattcaagtatagttaaggctttaaacctagttaaggaaggtatttgtgatgctgttgtatcaggaggcagtacaggtgcatttttagctgggtgtacgttgataataggcagaattaaaggaatagaaaggcctgctcttgcacctataatgcccgggagacgtggaaagtttatgatagtagatgttggtgctaatgtagattgcaaaccttcatttttggtgcaatttgcaaagatgggaaaaatatattatcaaaaggttttcaacgttaaaaatccgactataggacttataaatattggagaagaagaagaaaaaggaaatgaacttacaaaagctgcttttaagcttttgaaggaagaaagttccataaacttcaaagggaatatagagccaagagaaatacctactggtgacactaatattttagtaagtgatggttttgtggggaatacagctttgaagatgtatgaaggatcggcttcgagtatattaggtataattaaagatgaggtgcttaaatcgtcgattatatctaaaataggggtggttctgctaaaacctgtgctaaaaaatataatgaaaaagtttgattataaggaatatggtggagctccgttcttgggggttgatgggatttgtataaaagctcatggcagttctgatgcaagagcgtttaagaattccattaaacaaactaaaattttctatgataataatgtattaaaagatataagaaatgaattttcttcggaaaattagttaaaatatattgaaactaatattgacgatttaaacaatatataatattatctaaatgtagaacttgggaggtgaaacaaatgtttgaaaagatccaagcaattattgctgataaattaagtatcgatgtagaaagcgttgttatggaagcatcatttattgaagatttaaatgcggactcattagatatagttgagcttataatggctctagaagatgaactagatatggaaatacctgacgaagacgttgaaaacttcaaaacagttggagatgttgtcaattacgtaaaagctcatcacgaagaataaaataatcccgcatcttgcgggattttatattttacaaagtgagaactaaatttaaaatcattttaaaatagattttagtgagaaatgtactttagtaatatattggcgtacaaatgttactgtctatgataacgatgtttttagttggaatttaggaagaaaaatcattatagtaactaaaatatcaaattaatagtttattcttgaatttgttatgagaagtatataacaataggttagcaagttgaagaataaacttcaaggagtggaatacatgaatagatatacacttaaagaaatagaagaaaatttaggggttttttttaataaccacacattactaaaaacggctcttactcatagctcttttggaaatcaattcaaggatgcggagtataatgaaaggcttgaatttctaggagactcagtattgcaactttgtattacggaatacctttttaataattacaaacataaaacagaaggtgagctgacaaaaataagaagcttgatagtttgtgaaaattctctttatgaaattgcaaaaaagataaacttaggatcttatattagaatgagtaaaggtgaagaaattacaggtggaagagaaagaatttcaatacaggcagatgctgttgaggcaatcattgctgctgtttatttagacaaaggcattggctttgtaagagattttatattgcttcattttgaagagataataaataaagcaataaataatgaaattgtattagatttcaagacaaagcttcaagagcttcttcaaaaagatggagaagtagtaattcaatacgagcttacgaaatttgaaggaccacctcacagaagaaaattttttacaaatgtagtaatagataaaaagttaatgggtgaaggttcaggctatagtaaaaaagaagcagaacaaaatgcagctaaacaggcattagatatattggaaggtaagcatgagtaaaaattattatataataccgatctttgtacctcatgaaggatgtccgcataattgcgtattctgtaatcaggatagaataacaggtgttgatgatgaagaggttacggcaagttccgtaattacaacaataaatgattatctagaaactataaagaataaaaatgcaactattgaaatttcattttttggtggtacatttacaggaattagggaagaaaaacaaagggaacttctaaaagtggctaaggagtttaaggaaaaaggtcttatagataaaataagactttctacaagaccagattacatcaatgattacatacttacatatcttaaagagtatggagttgacataatagaacttggagttcaatcactaaatgaagaagtgttaaaaaaagctggcagaggacatagcgttcatgatgttatagatgcatctaaattaataaaagaatataaatttatattaggacatcaaataatgcctggactacctggagatacttttgaaagagatatagaaacgactaaagaatcaattaagatgaatccagatatttgtagaatatatccgtcgttagttataaaagatactccaatggaaagaatgtatattaataacgagtacattccatattctcttgaagaggctgttaatgtaagtaaggttatgtatgatatgtataaaaagcataacatcaacgtaataagaattggtcttcagccgacagaaagtataaatgaagggaaagatatagtggcaggtccttttcatccatcatttagagaattagttgagggcagtttattgtcagatattattttagaaaatatgacggatgaaaaaaatggagtaatttatattaactcaaaagatgtaagtaagctttatgctaataaaaaattatattttaacaggcttaaagataatggtaagattgttgatgtgaaacaagatgatgatattgaaagaggtcatataaaactttgtttgaaaaatagaaagttagacatagcatactagcgagaggagactctcgcttttaaaatgttaattatgtttatgaattttaacttaggcataatcaaaaaatgacaagtctatctgtcaatcctgttttcttctttcatatgccttaacattttcttttgtgtgaattattgatatttaataagctttactataaactaaattataataaggagttgtttgatatgaaaaaaaagactagagaaaaaatgataattgcaatgactatttttattgtagtaatctttattgtaacattattacctagtatattttctttttaaggagaggacacatgtttttaaaatctctagaaatacgaggatttaaatcttttgctgataaaacagaattaaaatttaaacaaggcgttacagctgttgtaggacctaacggaagtggaaagagtaatatttcggatgcggtaagatgggtgctgggagaacagagtgttaaggttctaagaggcggaaaaatggaagatgtaatatttgcaggaacgcagtttagaaagccagtgggccttgctcaggtttcactaacccttgataatagtgatgaaaagctcgcgacagaatataacgaggtagttgtatcgagaagaatatttagatcaggagaatcggaatatttaataaataattcaaagtgcaggctaaaagacgtaataaatctttttatggatacaggaattggtaaggaaggttactcactaattggacaaggtaagattgaagctatattaagtggtaagccagaagatagaagaaatctcttagaggaagctgcaggtattgtaaagtttaaaaatagaaaagaagaagcagagaaaaagttaagcaatacagatgaaaatttagttagaataaatgatattctgtcaacttacgaagagagaatagaacccctaaggattgaaagagagaaagcattagaatttactgacttatctaataatttgaagaaaaaagaagtatcacttatagtacataccatagacaaaatggaagaagaattaaaagggttcaatgaagatttaaatttaaaaattaaagaaattgaagataagcgtaaagaagtatctagttataagtcacaacttaaagaactagagatgaaaatagaaaagctagaaaagaagaatttagaagaaaaagagaaatattatagcttaaaagaaactgttagtgaagatgaaaaaagtatagaactttataaagaaagaattaagagttttgaagaaaagatcaataggaataattatgagctggatgatattttaattaaggtaaatcagcttaatgaaaacaagaaattattagaaagcgaattgagtgaaagactaaaggaacaaagattaagagaagaagatatagtaaatttagaagaaaacaatataaaaagttctaaggaacttaaaagtatagatgaagaaataaaatctctaagagaaggtgaatttgaacttttaagaagtaactcagatatgaagaatgagattactatgctaaataaagatctctcgctaagagaagagaaaaaagaaaccctaaattcgtctatatcttttctagaaaataatattgttattaatttagcgacttataaagacctgaccaatgaaagtgaaaagaataaagacaatataaaattgctaaatatgcaaatagtagagcataagaaaaaaataggttctctatcagcaaatttaactaaaaaagaaaatgagcttagagaattaagtgggactttaacaaaacttgatgcaaatagatcaatgttagaaaacttggaaaagcattatgagggatataacaggtcagtaaaatctttaatggaatcaattcatagggaaagaattacggctgcaaatgatactaaagtcttaggtgaaattttcactgtaggtaaaaagtatgaagttgctatagaaatagctttaggtgctgcgatttcaaatgttataacaaaaaatgaagaaatagcaaaagttcttataggatatttgaaaaaaaatagtctaggaagagcgacatttttacctttaaatattataaaaggaaagaagttagaattagatagaagtataactgaagctaatggatatattgggattgcaagtgacataatatcttatgataaagagtataaaaatataatggattattctctaggaagaacaataatctgtagtgatatggactgcgctcttaatatcgcaagaatcggaaaatataattatagaatcgttactttggatggagaaatcataaatccagggggagcgttaacaggtggtagcataaaggggaaaaattcaaatgttctaggtagaaaaagagaaattgaagaattagtattagatataagcaataaaaaagagaaatatgaggaattgaaaatactagttcaagatatcaagaaagaaatacaagacctagatgaggatatgctgaataaaagggatgaagttcatgagaaaaatattgaacttacaaaaaaggaaagtgagattaaagggttacagtctgatacggataagttaaagagaaatctagaaactgctaaagaagaaataaaaagaatagcaggtgaaagagaagctatattagaaaagattagagctaaagaatctgaggttcaggtgattgaaagtgaaaatacagctaacaagagcaaaagtatagaactggaacagttaatgaaaatcaaagttcaagaagttaacgatagcgatactaagcttacagaaatgaaaatcagtaaggctaagttggatgaggcaatagaaaataaaaagaatgaatttttaagaatagaaaaagaaattaaggatttagagattaaaaatgaacttttaaataatgaaaatgaggaaaataaaaaaaatattgaaagtttaaatttagatataaaggctaagaataagaatattgaagaaaataatattaatatcagcaatttagaagtaaacttcaaagatgatgagatattaaaagaaaagttaaagcaagaatttaaagaaaaagataatgtaataagcggtattttggatgaagtcagcttaaaagaaatggaagttaataaacgagaagtaattaaagctaagaaagaaaatgatagggagcatgtttataagaaacttaatgaagagttagaattaacttatgcagaggcattagataaatgtgagccagtagttgatgaggaagctttgaaacaagaaatttttgttactaaaggaaagataacaaaacttggagtagtaaatttagcagcaatagaagagtacgaagaaattaaagaaaagtatgagtttatgtctactcaggcagaggatttagaaaatgccaaaagagaattaaatgccgttattgaagaaatgactaatgaaatgaaaagtttatttaaagaaaacttcaaaatattgaattataattttgataaaacttttaaagatttgtttaaaggtggaagcgctgagcttattttaggtgaaggtgatgagcttacagccaatattgacataaatgtagagccgccaggaaaaaaacttcaaaatattaatctgatgtctggtggagagaaggttctatctgcaatagctttactttttgcaattttaaagatgaaaccaacgcctttctgtatattggatgaaatagaagcggctttagatgatgcaaatgtatataggtatgcagagttcctaaaaatgttttctaaaaatactcaatttataattataactcatagaaagggaactatggaggtgagtgatattatatatggagtaacaatggaagaaaaaggtgtatcaaaggtagtttcagtagacttttccgatagctagcatccgtaaacctcctacttttagtgagaggtaacggctgcaagcttctggattagttagactaagatttaagatgagatgacttatcttaaatcaagtttcgcttgagcagaaaattttaattaggaggaaatgaatttgtttggaaatttatttaataaactaaaagagggattagcaaagacaagagatggactaacagataagataaatgaggccttaaatttggcagtaactatagatgaggatttatatgaggaattagaagaaatattaatcatgtctgatatcggtatggacacaacagtagatattatagaaagattaagggggaaaatcagaaaagaaaaaataaacgatcctcaagaagtaaaaccggcattaaaggaagtaattagagatatattacttgaaggtacatatgaagatgacgaaaaagaaaagaaagtaatgcttataattggggtaaatggtgttggtaaaactacatctataggaaaacttgcagcaaagaataaacaagaaggaaaaaaagtattactggctgcagctgatacatttagagctgctgctattgatcagcttgaagtatggagctctagagccgaagttgatatagttaaacatcaggaaggatcggatccggctgcggttgttttcgatgcaatagaagcgtcaaaggctagaaatgttgatctattaatatgtgatacggctggaaggcttcataataagaagaacttaatgaatgagcttgaaaagataaacagaataattgatagggaattgcaaggctatagaaaagaaacgttactagttttagatgcaacaacaggtcaaaatgctgttattcaagcaaagcagttcatggaggcttgtcctatagatgggataatattaactaaattagatggaacagcaaaaggtggtgttgttttatctataaagcaaagcttaaatattcctgttagatacataggagttggagaaggcattgatgatcttcaaacatttgatgcagaaggatttgctgaagcattaatatagggttagataagaaataataggccaatatgtttggtctattattttctttcatgtgccttaaaaatatttctagaaaaatatataaaaattaaactatgtttgaatatttatatgaaaatatatttctataaacacatttttaaaggtacatagatttatataaaaatagttttaaagattcatatttttaaatttacatatgaaaatatgtaaatatttattggaaacatcaggagttcaaggtttttggttatgagtatataaaatataaataatttaaaagtcattaattgcatcaagaaacttgagatataaagccttgatgtaaaaaaatcaaagtgttaagtaaaaatacttgacactttgaaataatcctgttaaaatctcttttgtgggtaaggtgattaaatggaagatagagttgagatttcgttacttatggatttttatggtccgttattaacagaaaagcaaagtgaaattatgcagtggtattataatgatgatttatcgttagctgaaatagctgagcttaatcaaacgagtcgtcaggctattcatgatttaatcaaaagatgttataaacaacttctctcctatgaaagtaaacttaacttacttcaaaagagtataaatagaaaaaaggaaattatgaattttttagaacacttaaaaaataaatattccatagatgatgaggatattataaaatataaagaaaagctagaaaatttataaggaggagtaaacatggctttcgaaggattaggtgaaaaattacaggagacttttagaaaattaaaaggtaaaggaaagttgactgaaaaagatataaaagaagccatgagagaagtaaagcttgccttactagaagcagatgttaactataaagttgttaaacaatttatttcttctgttagttctaaatgtgttggaagtgaagttcttgaaagtctaacaccaggacaacatgtaataaagatagttaatgaagaacttactaatcttatgggtggaactgaaagtaaacttaattatagtagttcaggacttacagttataatgttagttggattacaaggagcaggtaaaactactatgtgtggtaaacttgcgctaaaccttagaaaaaataataaaaagccattattggtagcttgcgatatttatagaccagcagctataaagcaattagaagttgtaggaaaacaaatcgaaattccagtattttcgatgggagataaagtaagccctgttgaaattgcaaagaatgcaatcactcatgcaaaagataatggaaataatgtagttatcatagatactgcaggtagacttcacattgatgaagaattaatgcaggaactaaaaaatataaaagataatgtaaacccgtcagaaatattattagttgttgatgctatgacaggtcaagatgctgtcaatgttgcagaaaactttaataatgatttagatttaagtggagttattttaacaaaactagatggtgatactagaggtggagctgcactgtcaattaagactataattgataagccaatcaaatatgccggtgttggcgaaaaaatgaatgattttgaagtgttccatcctgatagaatggcatcaagaattttaggaatgggtgatgtattatcgcttattgaaaaagctcaggaagccattgatgaaaaggaagcagctgatttaggtaagagaatgttaaatcaagaatttaactttgaggattatctaatggcaatggaacagatgaaaaaacttggacctttaaataagattatggaaatgatacctggcttaaattcaaaggaacttcaaggagttgactttgataaggggactgaggctcttgataagactaaggcgattattcaatcaatgacattaaaagaaagaagaaatccaagtcttatactaaaatctccatcaagaaaaagcagaatagctaaaggatcaggtactaatatacaagaagttaacaaactcatgaagggctatgaaatgatgaaaaagaacatgaagcaaatgaagtcattccagaagcaggcaaagaaaggcggcctatttggcaagttacctttctaagcattagagttaaaatatatatttattatcctttaaaggaggtgaaattaaaatggcagtaaaaatcagattaagaagaatgggtgctaagaaagctcctttctatagaataattgttgcagattcaagagcaccaagagatggtaagttcatcgatgaaattggatactataatccattaactgaaccagttgaagttaaaatcaacgaagaaaaagctaatgaatggttatctaatggagcacaaccaacagaagtagttaagagacttttcaataatgcaggtcttactaagtaatttttggaggtgaattctgcagttagtacatactaattgtaggcgtttatgaaggaattagttgaatttatggctaaatcccttgttgacaacccagatgcagttactgttaatgaggtagatggagaacaatccataatacttgaattaaaagttgcaccagaagatatgggtaagattataggtaagcaaggaagaattgcgaaagctataagaacagttataaaagctgcagcagttaaacagaataaacgagttatagtagaaatcatctaaaaattgagagttagggaaacctaactctttttaaatatacacattagaaaaaagcgcgtaagcgcaattgagaacatttcgtctataaaaatgcgcgtcagcacaattaagattaattcgtatatgaaaaagcacacgtatatgagaagagtgcgattaacaattcggaacttgttaagtgaaactaagatcatataggcaatctaatatctttaataatgagttcaaagaaaaaagtatataataatttatatagggcataatcaaaaaaataatggatttcagtataagatactattaaaaataacaacaagtcagtatgctggtctatttttcgtcatacgcgtctctaagttattttatgccattattcttcttatgcttaaaatgaggtgaaaagagtgggaaatttatttaaaattggtcagattataaatacacatggaattaaaggcgaagttaaagtctatcctctaacagaagatgtgaataaatttaaacgtctagaaactgttttagtaggtggagaggaaaagaaaatattaggagttaaatttcaaaaagatagagtgatactaaaaattgaaggtatagactctatgaatgatgctgagacttataaacaaaaatatattgaaataccacgcgaaaatgagccagaacttccacctgacacatattatgtttctgatttaaaagaatgtactatatatgatactaatgaaaaagaaattggaagaattttcgatgtaataagcactcctaacaatgatgtatattggattaaggaacctaaggaactattaataccagttcttagagatatagttctagatatagatataaaattgaaaaaaatcattattaagccagtaggtgaatggcaagatgaagattagcatattaacgttatttccagaaatgttttctattttcgatcatagtataataggaagagcaagagaaaataacatagtggatttagaaacgctaaacataagagattatacattaaacaaacataaaaaagttgatgattatccttatggtggtggtgctggaatggttatggcgcctcagcccatagttgatactataagggatgcaaagttaagtaataaagggaaggttgttttcttagggccgagaggaaaaacctttaaccaagagattgctaaagagctttctaaggaagaagggcttatatttttatgtggacattatgaaggaatagatgaaagagtttataagcatatagatatggaaatttcacttggagattttgtgctaactggtggagagatggctgcaattccggtcattgattgtatattaagattaattccaggtgttttgggaaaagaagagagctttatggaagagtcgttttataatggacttttagaatatccgcaatatactagaccagaagagtttgaaggagataaagtgcctgaaattctgctatctgggcatcatgaaaatataagaaaatggagaagacttaagtctcttgaggtaacaaagaagattagaccagatttatataagaaaattacattaaccaaagaagatattaaaatattaaaaaataaaaataataaataatttttgttgaaatataaaacattatgtgataatattaaatttgtgctagtacgggcgttccgctgtcatacatatgtgttaagaacgtcaaattatcgttaaggagggaatgcacaatgaacgaaataataagagctatagaagctgaacaaatcagaactgacttacctaaatttgctatcggggatactataaaggtatacgttaagattcaagaaggtaacaaagaaagagttcaaatgttcgaaggtactgttatcaaaaaacaaaatggtggtttaagagaaactttcactgtaagaagagttgcttacggaactggagttgaaagaacattcccaatgaatgcaccaatcatcgacaaaattgaaatcgctagaaaaggtaaagttagaagagctaaactttactacttaagagatagagttggtaagtctgctaaagttaaagaattattaactagatagtatttaaaaaggggactgtttcagtccttttttttattatatgagaaaattaatattaatatgtgattaatgtacagtgtataattaaggatggaaaattcaaggagttttctaataataaaagtctaagtgattttattatgatttgctacagggtgccttaaatggtatgaaatgtgcattgtgaactgaaaaataaatttaaggaggaattcatatggcaattaattggtttccgggacatatgaaaaaaacccaaagagaaattaaagaaaacttgaaattagtagatgctgtaattgaaataagagatgctagaattccaaggagttctgcaaatcctgatattgaaaaattgttagagggaaaaccaagaattatacttttaaataagagtgatttaaccgatggcaaagttacaaaagagtggataaattatttaaccaaagatgatgttaaagtattagaggttaattgtttaaaaggtgatggacttaagaatataaagcctacattattagcattacttaaggaaaagcatgatagattaaaggcaaaaggtatggttaatataacaatgagagtaatggttgttggaatacctaacgtaggaaaatctacatttatcaataaaatggcgagaaataatatagctaaaacaggtgataggccaggagttactaagagcaaacaatggattaaaacaggaattgggattgaaatgctagataccccaggagtgttatggcctagatttgaagatgatgaaacagctttgaatttagcttttactggtgctataaaagatgaaataatggatatagaagaattagctttgaaacttgttgaaaaattacaaagtaattatgaagagaaattaaaagaaagatataaacttaaagaagtttttgaaaatccattagatacattagatgctataggcaaaaaaagaggtactttaatttctggaggacaaattgactataatagaatagctgttatactacttgacgaattcaggggaggaaaaatgggcaatatcacattggagcgcccagcagaagaaaatgatacagtttaatgaagatataagatcactatcatttgcggaaattaaggaagaaatacataagttatctatagttgatttatatagaaatgatgaacatacaaaacttataaactggctagaagaagataaaaggaaaaatgtattatcacttaaggaaaagattgagaaagatttagaatcatatttaaatgaagttaaaagagtcaaaacaatgtatgagtttgataaatcatttggaagttatcgatatatagctggtgtagatgaagttggtagaggacctcttgcaggtccaatcgtagcttgtagtgttattcttgatttaaatgttttagaaaaagatttaatcttatatataaatgattcaaaaaaagtaaaagaacataaaagggaagaactttctgaaattataaaagaaaaggcattaagttatcaaatagcagtttcttctaataaagaaattgatgaaaaaggaatagcttttgcaaataataaagtgtttttagaaagttgtaattcacttagtataaaacctgatttagtattatctgatggctatttaattaagaacattggtatagagaataaatctgtcataaagggtgatacaaaaagtgctagtattgctgcggcgtcaattgtggcaaaagtgtatagagatagacttatgaaagagtatgctaagaaatatccacattatgactttgaaaataatgtcggatatggcacatcaaaacatatagaaggtctaaaaaaatacggaaaaagcgacattcatagaaatagctttttaacaaaattattgtaattaagttttggtcaaatgaaatttatatgaatggtatttatgtgtttaagataaagaagttgatttgaagtccataagaatattaaaataaataatattcttatggacttttttattttatatgctgtagcaataatcatacattaaggggatacaaaaagggctagaaaaactaaggtgagttaagtaattagttgagtctaaaggcatcttttatgtggtttattttaaaatttgtactctctaaatttagataaacttcaatgacatcaaatctaacattaatattaggtaatcttttataattaatataagaattagccacttttattatggatctttgttttgaaaaattaacagattctcttggcaatccataattattattatatctactcttaacttccacaataattagtaaagtattctttttgcatataatatcaatttcgcctaaaaagtttttgaaattacaatctaaaatactataatcattcttttctaaatatttcttggctaaatcttcgctaaaactacctatatctttatttatttttttcactatatcacttccaattttatttactgaaacatattaaaaattattaactgtattgctattatatctttgaattattaacaattaaaaaataaatataacaaatgtatttttatggaattaatatttgaatgtatgtctataatttttagtaggtgatttatatggcagtaaaaataattagtgcaacgcacaatggattagaaggttttttaataaaagtagaggtagatatatctaaaggcttaccggtatttaatattgtgggccttccagacacttcagtaaaagaagcaaaagaaagagttagagccgcaatattaaactgtggatttgaatttccattaggtagaattactattaatctggctccggcggatgtgagaaaaattggatctcttttagatttaccaatcgcgattggtatactaatggaatcaaatcagatttgcagaaagaatttagaggattatattatattcggagaattatctctatttggtgagcttaaaggggtaaaaggtactatacctataataattgaaggagcaaggaaggaaattagaaaatttatctttccttatgaaaacttagaagaaagttattattttaagaatgttgaatattacccattaaaaagtttaaaagaagtagtctcgcacattacatatgaagatatgcttccttatgagatagatgaagatggaaaagatgaagaaatattagattcgccagattacggagatattataggacagtattcttctaaaagagcattagagattgcagcagctggaaaacacaatataattctttatggagagccaggatgtggtaaaacaatgcttgctaaagcattaatttcaattttaccatctttatctcaagaggaattaatagagattgccaaaatatatagtgcatgtggtcttatgacaaggatttctcgtcttaacagaccttttagagcgccacatcatacaactacaagaatagcattaattggtggaggaaaagaaataaggccaggggaaataactcttgcacataatggtgtgctatttttagatgaaattttggagtttaagaaggatgttcttgaatctctaagagaacctcttgaagaaaaaaatgtgaatattaataggcttagtggaagttatcaaatgcctgctgattttttactaattggagcgtttaatccagtagaaaacaatgaggataaagattttaatgatagcaaatattatttgaatactaaaattactaaatattctaggaaattttcaagcgctttgctagataggattgatatattaaattacgtacctagactcaattatgatgaaatagaaaacaagaaagattcatacgattcgaaagctatgaaagaaaatgtacttagagctagagaaatacaaaaactaagatttaagaatacagtttataaatataattcagatataaaaggaaaggatatctttgaaatttgcagggttagtaagaaatgttcagagcttctaaaaaaatattataacacatcaagtgtatcattaagagggtatggaaaagtaataaaattggcaagaactatagcagatatagacaatcaaaaggatattttagagtttcatattctagaagcttttagttataggaaaaatattaatggagaaattatataggtttagaagggaacatgtataaatgaattatgaattgtggttaatacttattgatataacaagttttcaaaaaataaaattaataaataaatataaaacagcagaaaatgtatataataattttgaggagatattaaaagaaaatgaaacaatatctaaaaaattaaaaaattttcaaaaagatgatttatactatgaagttttaaaattagaagaaacattatataaaaaaaatataggatatataacatactctaatcctttatataaagagaaattgagcgggattttaaatcccccttatttccttttttatattggaaatatagacattataaataataaatctataggtgtagtaggggcaagaaaatgctcaaattatggactaactgtaacaaaactcttgacaaaggagcttattactaataatataacgcttataagcggaggtgcaagaggaattgattcaattgcacataaaacagctttagagaatgatggatataacatatgcgtattaggatgtggaatagatagaacttatccatctgaaaataaaatgttgttttctaaaatagcagaaaaaggcgtagtaatttcagaatttttacttggtacagcgccattaagagaaaactttcctaaaaggaatagaataattagtggtcttagtgatggcgtaatagttatagaagcttcagaaaaaagcggatctttaataacagctagacttgcgcagcagcaggagaaaaaagttattgctgttccaggctctatattatatgctggagcaagtggctctaacaaactgattagagatggtgctagtatatgtactgatatagaggatttaagagttttacttagtttagaacatattgaaattcaaccaatgaattttacaccagagaaaagtgaaatactagagttaattacagattcaccaattcacatagatgatatttttaaaaatacgtctgttgatagaggagctttatacgcattattatttgaaatgcaaataaaaagtgaaattatttgtctaccgggaaattactatgtgaaaacaatttaaaaatgtgtagggggtgaatacttcataaattttatggagttatactatgggtcaaaaacttgtaattgttgagtcgccggctaaagcaaaaacaatcggcaaatatttgggtaagaattatattgtagaagcatcaatgggacacgtaagagatttacctaagagtacattaggtgttgatatagaaaataactatactcctaagtatataactattagaggaaaaggagaattaatagataaactaagaaaggctgcaaaaaaagcagaaaaggtttatctcgcaaccgaccccgatagagaaggtgaagcgatttcgtggcatttagccaatatattaaaaatttcagaggatgaaacatgcagaattgtatttaatgaggttacaaagacagctgtaaaagcctctataaagcaagctagaaaaatagacttggatttagttgatgcccaacaagcaagaagaatattagatagacttgttggttatgaaataagtccgattttatggaaaaatgtaaaatggggacttagtgcaggaagagtacaatcagctgctttaaaattgatttgtgacagagaaaaggaaataaatgaatttataccaaaggaatattggtcaatagactgtacacttaaaaaagaaaaaaagaaatttccagttaggctatcaacatataaaggaaagaagattgagattggaaatgaagaaacatcaaatggaattataaaagagcttaataagggaaactttgtagtaaaaagtataaaaaaaggtaagaaaaatagaaatcctcttccaccttttacaacaagtactcttcaacaggatgcaaatagaaaattaaatttcatgacaaaaagaaccatgtcgattgcgcaagttctttatgaaggtgttgaagttaaaaattatggtacggtcggattgataacatacatgagaactgattcggtaagaatttcagaagaggctcaagaaagcgcaaaagaatttatagaaggtagttatggaaaagagtatcttccaggtgctcctagagtatataaaggtaagaaaaatattcaggatgctcatgaagcgataagacctacttatgtagagattacacctgaaattgctaaagaaaatttaactccagagcaatataaattgtattctctaatatggaatagatttgttgcaagtcaaatggcgtcatgcgaattaaatacacactcaatagatatagaaaatggagactataaatttaaagcatctggttcagtaatctcttttgatggttttatgaaaatatatgaatactcaaatgaagaagatgagaattctgtaatgttaccagagcttaaggaaaatgaagagttaaaagtggaatcactaaatggaacacaacattttacacaaccacagccaaggtatactgaagcatcttttgttaaattattagaagaaaaaggtataggcagacctagtacttatgttccaacaatttcaactcttctaggaaggaattatgttattcgtgaaaagaagaatctaattccaactgaacttggtgaaatagtaaataatattgtaagtgaatattttaggcaaatagttgatgttgattttacggcagatatggagagaaagcttgatgatgtagaagaaggatctgagaattggactcaaatagtagaggaattttttagtccgctaaaagttgctattgaaaaggctgaaaaagaaatatctaaagtagtaattgaagataaggtcagcgatgtaaaatgtgaaaaatgcggtcgtatgatggttattaaaagaggaaggtttggagaatttttggcatgtcctggatatccggagtgtaagaatgctaaacctatagttgaggaattagatgttccatgtcctgaatgtggaaaaccaattgtagctaagaagagcaaaaagggaaagaaattctttggatgtttaggttaccctgaatgtaaatttgtaagttggtatgaaccagtaaaagaaaaatgtcctaattgtaattcctatatggtagcaaagtattcgaaaacaaaaggaaactatatacaatgctcaaatagtgagtgtaattataaagaagaagtaaaaaaagataactcaaaagaagagtagaaataaatacgaagaaaacagctttataagtaaataagtgatattattttgtcgaatctaataaaaagagtgttgaaaagcaagattttatatgataaactagtcttggtagcaacttgtaaaaaaattcaataaattaagaattttctaacaataatattcttttgctaaataatattgttatacagctgccaaggaggattataatatgtcatcattattaactaaaactagaatgttaaataagattctgcagaaatctggtacagaacctgtagcgtttcaagatatatgtacattattaagtgaagttcttgaatgtaatgtgtacataataagcaaaaaagggaaagtacttggatatacttttggtaaagattttgaatgtgaagccatgaagaaaaaagtaatagaggataaaaaatttccagaagattataataagacattgttggaagttaatgaaacattatctaatctccctaatgaaggcagatgtgtatttcaagagattggtaagtgcaagaaggtagataagctatcaacaatagttcctattataggaagtagagaaagactaggaacattaattttagctagattcggtaatccatttactgatgaggacttagttatagtagaatatagtgcaacgattgtaggtatggaaatgcttagagctatgcaggatgaaataacagaagatactagaaaaaaagcagtagttcagttagctataggaactctttcgtactcagaattggaagcagttgaacatatttttgatgagttaaatggaaatgaaggacttttagtggcttcaaagatagcggataaagttggtataactagaagcgttatagtaaatgcacttagaaaatttgaaagcgcaggagttattgaatcaagatcacttggaatgaaaggtacttatattagaatattaaatgaaaagctaatagatgagttaaaaaagattaaataatagatagctatagacaagtaatggtctatagctattttttattcttttggaatttataattcagtaaaatctgtgaacaactttttggacggggaattaactagtggagtatctgaaagaataaaaaataaatcgtattcgccagctagatttttcttaaatgtgtttgaaaaggcagaagcgtaaaaaactcttgcttaacagcttcagagattttcttctaagagaaaagtaaaaaaataaattttgaagcacaataatacaaataataatatatagtttattccatttgtgtataagatttaactattttgagaagactttaagatgattaataaaattttattaaatacaaataatgtgcatatttttatttatgtaagttaaattgaaaaatttttgttgataccataaataccttatgatatactacttaaggtaagaaatacacacactatccaatttatagatttggtgcccttattttaagggaaatttataagatgaagatagtggaggtaaaaaccaaggaggtaacaaaatgtcagtaatatcaatgaaacaattattagaagcaggtgtacacttcggtcaccaaacaagaagatggaatcctaaaatggctccatatatcttcacagaaagaaacgggatctatataatagaccttcaaaaaacagttaagaaagctgaagaagcttataacttcgttaagcaagtagctgaagaaggaaaagatatacttttcgttggaactaagaaacaagctcaagaagcaatacaagaagaagctatcagaagtaacatgcatttcgtaaataatagatggttaggtggaatgttaacaaacttctcaactatcagaggtagaataagaaaattagaacaaattgaaaaaatgcaagaagatggaacttttgacgttcttcctaagaaagaagttataaagcttaaaggcgaaatggaaaaacttgaaaagaatcttggtggtatcagaaacttagatgcatcaaacgttggagcaatgtttatagttgatccaagaaaagaaaaaaatgctatcttagaagctaagattttaggaataccagttgttgctattgtagatactaactgtgatccagaagaagttgactacgtaatcccaggtaatgacgatgctattagagctgttaaattaataactgctaaaatggctgatgctattatggaaggaagacaaggcgaacaattagctgagtagtttatataaactttaaaagggtaagtgagttcactccaactgcccttttattaggtgttaaggattactttcgatatagaggaggaattaaatttatggcaaatataagcgcacaattagttaaagaactaagagaaatgactggagctaaaatgatggattgtaagaaagctctagttgaaacagaaggaagtattgaaaaggctgttgaattcttaagagaaaaaggacttgcagatgcagctaagaagtcaggtagagttgctgctgaaggtatagttaagacatatatttcagatgataagaaaacaggaacagttcttgaattcaactgtgaaacagactttgttgcattaaacgaagaatttgttggttttgctgataagttagctaaaatggtagctgaaacttcagttaaaacagtagaagaacttcttgaagaaaagtttgatggagaagcaacagtagcagaaagtttaaaagctttaatagcaaaacttggtgaaaacatgtcagtaagaagatttactaaattcgctattgataatggaatagttagtagctatattcatggtggtggaagaattggagttttagtagaagtttcttgtgataaggcttcagaagttttagatgaagttgcaaaagaagtttgtatgcaaattgcagcagcaaacccattattcttaggtaaagatgatgttgatgcaacatctatggaaaaagaaaaagaaatctatagagttcaagctttaaatgaaggaaaaccagaaaatatcgttgaaaaaatggtaatgggaagaattcaaaagtactttaaagaagtttgtcttttagaacaaccatgggtaaaagattctgataagacaatcaataaattcttagaagagaaatctaaagaggttggttctccagttaagataactagattcgtaagatacgaaagaggagaaggaatcgaagttgaaaaggtagactttgctgaagaagttgcaagacaaatcggtaaatagttggaacctaaagagaacactttgtgttctctttttttaagaaataaagtacatatacttattaaaaaggttttattgatccctaaaatattcaggaggtaattataaatggcagattgtaaatacaagagagtaattttaaagctttcaggagaagcattagcaggagttaatggatttgggcttgattttagtgtagcaaaaagaattgcgcttgaaattaaagaattaattgatatgggcgttgaagtaggaacagtagttggtggcggaaacatttggagaggtagaagtggagaaggcatggacagaactactgcagattacatgggaatgatggcaacttgtataaatgcattagcgctacaagattctttagaacaagttggagttaaaacaagagtacaaactgctatagaaatgaaggaaattgcagaaccattcataagaagaagagcaatgagacacttagaaaaaggaagagttgttatatttgctgctggtacaggaaatccatatttttcaacagatactactgcagcacttagagctgctgaaattgaagcggatgtaattcttttagctaaaaaggttgatggagtttatgataaagaccctcataagtattcagatgcaaaaaaatatgatacactatcatatatagaagtattagaacaaggattacaagtaatggactctacagcaacttcattgtgtatggacaatgaaattcctatccttgtatttgggttagatgagccgggaaatattagaagagctatgtatggagaaaatataggtacattagttgcaacacaaccaagaaaataatagaccagtatgcttgtttattttgtgccattggaagctcaactcacatgcgctcgctgagtaagcgattcacaccaaatcgtagatttgggttcttctctgctcatcagtaaactctactaatagcatcgctgtgagcagaatttatttccttgtgtgacgcgaaatatacgttgcatctttggtctattatttcttttatgtctttaaaaagaaataggaggaaaaatcatgattaaggatattattcaaaatgcagaagaaaaaatgaaaaaaacaatatctgtattaaaatcagatttatcaacaatgaaagcaggaagagcgaaccctacgatgcttgatagaattcatgttgaatattatggaagcatgtgcccacttagccaagtagctaatgtttcagctccagagccaagagtacttatgataacaccgtgggaaaagcctctattgaaagagatagaaaaagctatattgaaatcagatttaggattaaatccttcaagtgatggttcaatcatcagactagtaataccagaattaacagaagaaactagaaaaactcttgttaaaaatgttaagaaaacaggagaagaagctaaagtagctataagatcaataagaaaaactgctaatgataaaataaaagcattgaaaaaggatgaggatttatcagaagatcaagtaaagaaagctgaagatgaggttcaaaagaagactgatgcagttgtaaaggaaatagattctataattgctgcaaaagaaaaagaagtcttatcggtttaaattttaaagcctgctagaaaagcaggttttttccttaagcagattttagaattcagaatttagtatatgaataatttattctttgaacaagctgaagagtaaaaatctaaatatattatttagattggttaatttagttaactcctacaagagttaacttgtttttgaataaaagataagttgtaaagtaaattttttctcaggacaagtgaaatatagattcaatatctataagagtagaatatttgtgaaattgttgaaaagtaatacatattattacattttgtttaaatgaggataattagtaaagactttattgttgacttcatatgaaaaaggtttagtattaataatgtatataaagaatatatgcgggtaggtcaagtttttctaataaactagggggagaaagatgttaaatatatttaaatcaaaaaaggaatttaatcaagattttgacttggatatgaataacataccaaatcatatagctataataatggatggaaatggacgatgggcaaaagaacagaatttacctagaagtatgggacataaagcaggagtagagactattagaaggattttaaaggaagcaacaaggcttggaataaaaaatctgactttatatgctttttcaactgaaaattgggctagacctaaagatgaagtaggaacactaatgaagcttttagtaacttatctaaaaaaggaactaaaagaatgccatgagaatggagttagaatgaatgttttaggagatacttcgaaattacccaaggaatgccagaatgcattagaagaagctttagaaaccactcgaaataatacaaaaataaatttgaattttgcactaaattatggtggtagaaatgaaattgtcagagctataaaacttattaattcagatataaagaatggcaaattaaacgaagaagatattaatgaagctttagtagagaagtatttatatacaaaagggatacctgacccggatttaattattagaccatcaggggaacaaaggcttagtaactttttattatggcaatgtgcttactcagaattttggtattctgatattaattggcctgattttaaagaaaaagatttaagaaaagctatagcggattatcaaaatagagataggcgctttggaaaagttaaatagaggagtggttagattttgaagtctaataatagatatttgggtgctgctatgattgctccatttatagtatttgtatttcttggagggatttatcttaaatgctttatattcgcattgtcagcaatggctttatgggaattttacaatgcattaaaagagaatgatttaaaaccaatgagaagtgcgggatatatcctgttgataatatattatcttttgaataacaatttcgaaaatatgatgtatgttgttgttgctgcaacgttcatattattgatatttccggttataaatttgaaatatacttttattgacacatcactaacattgcttggatttatatattgtggaattttatttagttttgtgtatcttgttaatgtgaaagcaaatggtgaatttttagtttggattatatttatagggtcatggctttcggatacagctgctttttatagcggaaaactctttggaaagcacaaactttcgcctaaagtgtcacctaagaaaaccatagagggttcaataggaggtcttgtaggagcaactgtttttacaggtatatttggaatagtagtgcaaagatatgttaatattatgccaatatataattatttcattatcggtattttatgcggattatttggacaattgggagatttggttgcatcatcaataaaaagatatgtaggagtaaaagattatagtaacctaattcctggtcatggaggagttctagatagatttgatagtataatttttgcagcagcagcagtgttttattacttaacttttataataagaatttaaaaattagagagaaattaagcgttatatagtataacttatataaggcttaattttttttatataagttaagttatgaagtttttaacaagagatgattggcatataatatacaaatattaataattattaagttagtgaggtgaagaatatttttaaaacttataagaaacttttctcacttttattgtctttcgtatttgtattaataggaaccttttttataaaatactattttaagccgtttttatccatgattataataattatagtatgcgctcctatatacaaaatcatgattaaggctaaaatgccaagtaaaattgcgggtgctttaagtattgttactgtcaatattatcataatacttgtgacaatatatttgggaagtgaaattttttatataataaaaaaattatacctaacaaatttagaatggatagaaaaatttattcaagatatttcagttgcattaaatgtaaattttaataacttggaaattggaaagagcgtaatatccataattaatgatcagaatataaggaagggagcagtaaatactggagatagtgttttagcttactttataggaaacatatgtgctttctttatattgattgataagtcaaaaattttagaactaatttctatgttacttccaaaggaaatgatgatgaaatttagagatcaaaaagaaaattttactcaaatgattggaatagaagggatcttagttataatttcaactatggagataataatgggattttgcatacttggagtatcgaatttttttgcccttggtatagtgtgtgggatattggatatattaccatatgttggaactataattgtatttattccgattataatatacaatattataatgaagaatttccttactgcatttggtcttatatgtctatatatactagtgcaagttattagggaaatactagaggctaaatttttaggcgacaaattagatatgcatcctcttgttatattgttatctatatacataggagtaaaaatatttggtgttttaggtatattaattggcccaatgtatagcattctagcaaaagaaataatttatagtactgagtgattatgaagaataaggaattttattttgatttaaataatttatttaaagttaattaagagacttttaatcttcgaattaaaccttgagcagtactgattaagatttgcttttaggaggaaaaagaatgaaaaacatttctatactaggggctacaggttcgataggatctcagaccttagatgtaataagaaaatcaaatggagaactaaagcttataggagtaacggcgaacacatctgtaaaaaaagttattgagataattgaagagttcaaaccttcttatgtaggtatgatggatgctgtaagtactcacgaaataaaaaagtattgtgaagagcataataaaaagattaaagtattggaagggatagaaggacttgataagatagcatctttagatgaaattgatatggtagtaacttctgtagttggaatgataggattagagccgactatgaaagctatagaggcaaaaaaagacattgctcttgccaataaggaaactttggttgtagcaggcgaaattgtgatgaaagctgccaaagagaacaatgtaaaaatatttccagtcgattcggaacacagtgctatatttcaatgcttaagggggaatgatataaatactttgagaaaaataattttaactgcttcaggaggaccttttagaggaagaactttagaaagtcttgaagatataaaggtggaagatgcactgaaacatccaaaatggaatatggggagaaaaatttccatagattctgcgacacttatgaataaaggacttgaagtgatagaagcacattggctttttaactgtgattatgataatatacaggtcgtagttcatccacaaagtattgtgcattcgatggtagaatataatgatggaagtatagttgcacaacttggagcacaggatatgagattaccaatacaatatgctctactttacgaaaatagggaaaagcgtattgcagatacaatagatttttatgaaatatctcaattaacatttgaaaaacctgatatagatacttttaaagctttaaatttagcgtttaaagctggaaaagcaggtagacttatgccaactattttaaatggagcaaatgaagcagcggtagagttgtttttagatagaaagataaaatttttacaaatagctgacataatagaaagatgcatggaagtatttaaaactcaggcaaataaagaattaaccctagaaaacattattgagttagataaagaagttaaggaatatgtaataaaaaatgcggtactttaaggagggaaaaatttaatatgtatataattttggctatattagcatttggagtcttgataatagttcacgagcttggacattttacattagctaaacttaatggggtaagagtagaagaattttcaattggaatgggaccgaaaatcttttctaaccaaggaaaagaaacacaatattctttgaggttatttccaataggtggatatgtaaaaatgatgggagaggaagaaagtgttgaagacgaaagaagtttttcagcaaaatctccattaagaagaataagcataataattgctggtgtatttatgaattatgtattagcgatagttatttttactttctttatacatgcgtttgggtacacaaataagattccgactggagttactccagattcaccagcctcagaagctgggattttaccaggagataaaatcgtgaaagtaaatggaatgagagctttctcatacgataatatttcggctggaatagtattagcaaatggaaatccagtagatatttctattgaaagaaatggagaaaagaaggacgttacggtaacgccaatgaagaatgaacaaggacaattattaatagggcttaattttgaaagaattcaaaatccaggatattcagagagttttaagcagagctttaatcagacagcttcgttagtttctcaaacttttaaaggtttagagatgatattcacaggtaaggctaatctaaaaactgatgtaggtggtccacttacaatagttaagatttcggcagaaactgctaaagctggaatttggccgctactttactttactgcttttttaagtgttaatttagctgtttttaatcttttacctttcccagctttagatggaggctggtgtgtgatattacttatagagttaataactagaagaaaggttccggataaaatagttggagttttaaattatataggatttgctgcacttataggtttgatgatattagtaacaataaaagatatattgttccctgtaaagttctaagaataaaaaatgattttataactataaaaaacttgcattcagatttgaagtgattcttatatgaatgcaagtttcctaagtttaaagtattaaacttactatacataattttaataatgtacaatttataagaattataagacaaatattaaaaaaatagtattagaaatattttgataaaagagaaatatgcaaaaatatatatgcttcaattcacaatgcacaattcacaattacggctagaattcttgcaatatttttagaattatgttgaagaattatttttgcaatatatatataatgtttatattttagattaattataattagaggagatacattgtatggaaagaagaaaatctagaaaagtcaaagttggaaatgtatttgttggaggggactcacctgtcacagtacaatcaatgacaaatactcgtactaaagatgtggaaaatactttgaatcaaatagaaaagctatatagcgctggatgcgatatcataagatgcgcagttttggatatggaagatgcagaaagtctaggggaaattacaaaaagatctccaataccagtagttgcagatatacattttgattataaattagcgctaaaagcaatagaaaatggtgtttcagctcttagaataaatcctggtaatataggaagtgtagatagaataaaaatacttaaagaagcttgtagtgagaaaaagataccaataagaattggtgttaactctggatctctagaaaaagatattctagaaaagtatggcatgccaacggcagagggtttggttgaaagcgctttaagacatgttaaaattttagaggatttagactttcacgatattgtgatatctataaaatcatctagtgtacaaatgatgatagaatgttatagattgatagcagaaaaatgtgattatcctcttcatttaggagtgacagaagctggaactattcaaagagggacaattaaatcaagtataggaatagggacgcttcttgcagaaggaataggtgatactataagggtatcattaaccactgatccaattgaagaaataaaggttggaattgaaattttaaaagcattgggattaaggaaaaaaggcgttgaattcgtatcttgtcctacttgtggcagaacacaaataaacttgataaaaattgcagaagaagttgaaaaaaggcttgaaaattataaaaaagatattaaagttgctgttatgggatgcgttgtaaatgggcctggagaggctagggaatctgatattgggattgctggcggaaaaggagaaggaataatttttaaaaaaggcgaaatcataaagaaagtaaaggaagaagatcttattgatgccctaatggaagaaatagaaaaattatgcacagatgaagatggtgcggagcacaattaagaacaactcgcagatgaaaaaagcacggagtgcaaataagaacatttcacagatgaaaaaagcacggagcacaattaagaacatttcacagatgaaaaaggcacgaaattaaattagggatgttttcgcagattgaagaatcgcggagctaagtatatataataatgtatatgtctataaaatgtattttaaaattgtgaattatgaactatgcattaaaatattgagcagatatttaaaatttgggaatatcccttgtaaagttaatttgtttatgatattatataagaagatttatttctaatagctagaaaaaaggagtgggaagttacccgctctttctgtttgtaacgcaactaacttaagatagttgcgtttttgattacaaattttaaaaatgcataagatagatataagacatgtgtttttaaaagatgaaagtgagggttagaaagatgaaaaaagatgtattgattgaaagaattgaagaattagtaagacctattgtttcagaattgtcatgtgaattatattatgtagaatatgttaaggaaaacggtgagttttacttaagaatatatatagataaagaaggcagagtatcattaaatgattgtgaagcggtttcaagaagagttagtgagattctagatgtggaagacccaattaaagaagcatattatttagaagtttcttcgccaggtcttaataggggattatataaagaagagcattttaaaaagtacataggaagcgaagtgctaattaggcttactagttcactaaatggagtgaaaagtgtaaaaggattattaagagatgtctcagaagattctatattagtagaaggcgagacagaaattcaaataccaagagataaaattaaggcagcaaatttagaaggggaaatataacgaggagggtataaaaatgaatgaagagtttgtaggtgctcttaaagaattagttaaggaaaaggggatttgtgaagatttactttttacaactattcaagacgcgatggttgcagcatataagaaaaattatgcaaatgccaatacaaatgcacaaaacgtgaaagttaatatcgatagagaaacaggagaaatacatgtatatgctcaaaagacagtagttgatgaggtatatgatgatgtaacagaaatttcattagaagaagctaaagaattaaatcctaaaagtgaagttgatgatattataagtttagaagtaactcctaaaaatttcggaagagttgcagcacaacttgctaagcaggttgttactcaaagaattaaggaagctgaaagaactataatatatgatgaatacaaagaaaaagaatttgatataattacaggaactatattaagaaaagataaaggtattgtttttgtaaatttgggaaaattggaaggtataataggacctaatgaacaaattccaaatgaggaatataaattcaacgaaaagttaaaactatatatagttgaagttaaaaatggtaataaaggacctcaaatacatgtatcaagaacacatcctggattagttaaaagactatttgaacttgaagttccagaaatatttgaaggcgtagttgaaattaaaagtatttcaagagaagcaggttcaagaagtaaaatagctgtatactctaacgatgaagaagtagatccaatgggcgcttgtgtaggaccaaaaggagtaagagtacaaagtatagttaatgaacttaagaatgaaaaaatagatataataaaatggagcaaaaatccagaagaatttatagctaattctttaagtcctgcaaaggtgctaagtgtagcggttgatgaaaataataaatctgcaaaggttgttgttgatgataatcagttatcgcttgcaataggtaaagaaggccaaaatgtaagacttgcggctaaacttacaaattggaagatagatataaagagtaaatctcaaaaagaagcgcaagatgaagaagatgaaagaattctaaatactgaagtagaaattgaaaatgaacaaactacagatttaaatgaattagaaatttttgatgatattgaagttgatgattcaatagatgaagaaacttcaatggaagaaatacaagaatagaggggtgcttttcatgaaggttaagaaaattcctttaagaatgtgcactggttgcatggaaatgaaacaaaaaaaagaattaataagagtagttaaaactccagaaggcgaggtgtgtgttgatctgactggtaaaaaatcaggaagaggcgcatacatttgtaagaacacagagtgcttagaaaaagcatttaaagcaaaaagacttagtagaaatttagaaattcctataagtgaagaaatttataataaactaaaggatgaagtaaataatgaataagttttttaactttctaagtatggcaaagaagtcaggaaacttgcttgaaggatatagcaagtgtgatgactatagaaataatactaaaatttatctttttatcatatctaatgatttatcagataaatctaaagataaatttaaaaagcattgtaatgaaaaaaatataccatatattgaagacttctcaaaagaacaactaggacctccaattggacgtaaagaaattatgttgctgggaattctagataacgatatagcaaaaagactgttagcgttatatgaggaggaaaaaaatatatgagtagataataatacgggggtgactgcatgtcaaaaataagagtacatgaattagcaaaagaattaaacatagagtcaaaggaattaataactatattaaaggaagaatttaatatagaagtaaaaaatcatatgagtacaattgaagacgaagatgctgaattaataaaagaattattagcaggaaaatcaccaagcgatttagtagcatcggctgataatgctgagaattcaaaaagcatagttgacgtatatgaagatgaattagcagaacaacttaacaaaggtataaagaaaaagaaaaagactaaaaaagaagaacaagaagaagcaagaatagctgctgaagcagaggctgaaggtaaagtaattgaaattggtggaagcataactgttaaggaattggcagaaaaattgcaacaaccttcaaatgatgtaataagaacgttaatttttgccggagttatggcagcaataaatgcggaaatagattttgaaactgcagaaaaggtttgtgctgaatatggagttttagttgaaagaaaagaagaaattcaagagttagaagtattaaaaatagaagaagatgatgaagaaaatcttcaaaagagaccaccaattgtaactgttatgggtcatgttgaccatggtaaaacatctttacttgattgtataagaaaagcaaaagttactgatacagaagcaggtggtataactcagcatataggtgcttatactattaaattgaacggagaagaaataacattcttagatactccaggtcatgaagcgtttacagctatgagagctagaggtgcacaaattacagatgttgttatattagttgttgctgcagatgatggaatcatgccacaaactaaggaagctatcaatcactgtaaagcagcaggagttcctattgttgttgcaataaataaaatagataaaccaggagcaaatgtagatagagttaagcaagaattagctgaacaaggattgcttgcagaagactggggtggagatactatatgtgaagaagtatctgcgaaacaaaaccttaatattgataagttattagagatggttctacttactgcagaaatgcttgaacttaaagcaaacaaagatagaagagcagttggaactgttatagaagctaaattagataaaggtagaggagcagttgctagtcttttagttcaaaatggaactttaagagtaggagattctatattagtcggatctacatatggtagaataagggctatgtttgatgatactggtaaaaaaataaaatctgctggaccatctataccagtggaggttctaggactttctgaagttccagaagctggagatagatttaatcaagtaaaagatgaaaaaactgctagaaatatggctgaaagcagaaaagacaaattaaaagcagaaactttacttgctaaccatagagtatcattagaagatttatataatcaaattaaagaaggtaaggttaaagagcttgctataatcgtaaaagcagatgttcaaggttctgttgaagctataaagcaatctttagaaaaactttctactgatgatgtaaaggtaagagttattcatggtggtgttggagctataactgaaacagatataactcttgcgacagcatctaatgcaatagttataggatttaatgtaagacctgacaacaatgcggctgctcaagctgatagagatggagtagatattaaatcttatagaattatatatgatgcaattgatgatgttaagtcagcaatgataggaatgcttgaaccagattataaggaagttatattaggaacagcagaagtaagagaaacttataaaatttcaaatgtaggaacaattgctggttgttatgtgctaaagggtaaacttcaaagaaatgcagagacaagagttataagagatggaatagtaatatttgaatctgcattgtcatcattaaagagatttaaagatgatgcaaaagaagttaatgcaggatacgaatgtggtttaacaattgaaaagtttaacgatattaaagaaggtgacatcgttgaatgcttcatgatggaggcaattaagagaaaagaactttaaaagaggtgaagatcaacatggcaaactatagaggtggaagaattaacgaagaatttaaaagagaaattagtaatttaattcaaaatgaagttaaagatccaagacttacagctatgatttcagttacagatgttaaagttacaaaagatttaagatatgctaaggtttatgtaagtatattctctaaagatgatgaggaaaagaaaaataatctagaggcattaaaaaatgcaagtggatttataaggaaatcagtaggccaaaaaataaatttaaggcacacaccagaaataattattgaattagatgactctataaattacggtatgcatatggatgaattaattcaaaggataagtaagggcaatgagtagtcttaaagaaataaaagaagaaattttaaaatcaaaaagaattggattatcattccatacatctccagatggagatgctataggcagcactttagcattactaaatgcattaagacatttaggaaaggattcatatattatatcaagagatgttatttctgataacctctctttcctttcttttgccaacgaaattgatggtaatactttagagcctaaagagggcactgatcttgtaatgatattggattgtggtaatgttgaaagaatttctgcagatctaagtaattacaaaggtaagattattaatattgatcatcatatttcaaatgaagaatatggatttataaattatgttgatgtaagtgcagcggctacatgtgaaatatcatatttactagcaaaagagttaggaattgattttaataataaaactgatgttgaaataaatatagggaacgcagtttatacagggattgtaacagatacaggttcttttaggcattccaatgttactaagagaactcataaaatagtatcagaacttatagaacttggagtaaacaacagtaaagtccatagtaatctttttgataataaaccatttgagaaagtaaaattaatgggatgtgtgttatctaatattgagctcgctctagaaaataaagtagcagtccttgagataccgaagggaatgttagaggaatttaacttaaaaaatactgatacttcagatataatttcagttggccttggaattaaaggtgtagaagtttctatgcttttgaaagaagttgaagatggagttaaaggaagcttaagatctaaaaatgatgtggatgttcgaaaagttgcagaagtatatggcggtggcgggcatataaaagctgctggagttatgcaaaaaggtgtagatatagaaactgcaaaagaaaatctgctaaagatacttaaagaagagctcgactcataaaatataaattatatttacgaaaagtaagtaataacttcacttatataaggaaggaatagagaattcatatatgaaagatacaaaaacttcacagataaatggagtattaaatatattcaaaaataaaggaatgacttcctttgatgtggttagaaaaataaaattcttggctaacgaaaagaaagtcggtcatactggaacattggacccagaagctactggagtccttccagtatgccttggaaaagctacaaaaactattgattatatcatgaacagtaataaggtatatgaggtgaaatttctacttggagtgaagacaaccacatatgaccttgaaggtgagatattggagaagaatgaaatagatcatattaagagtgatgaagtttcagaggtcgcattatcctttatcggagaatatgaccaagttccacctatgtattctgcccttaaaaaaaatggagtaaggctctatgaattggctaggaaaggtattgaggttgaaagagaagcgagaaaagttagaatatttaatatatcagatttgaagattgaattaccttatgtatatatgaaagtagcttgttcaaaagggacatatattagaagtttatgttatgatattggtgaaaaactaaaagttggagcagctatggcagaattgaatagaactgaaacatctatttttaagcaatcagatagtgtaaacatagatgatttaactaaggaaaatatacaagattatattatgaccatagaggatgcactttctttttaccctaaaattacagtaaagagtacatttactaaattattaataaatggagttaaagtattcgataagagattgacaaatgaaaaaagagaaaaaaatgttctatatagggtatatgatagtgaaggcatttttataggaattggaaaacaagatgatgatggattcaaaatcgaaaaattgttgctttaggcatcttaactagtatgtagctgtttttctgggtgccttgatttaggagtaaggataatgataattatagataaacattcaaaagatattcaaagttctaataattatatagctcttggaagttttgatggacttcatattgggcatctttctttaataaataaagtagtagaagttgcaaaaaaaaataaagggagaagtatggtttttacatttaaaaaccatccaagaactcttataaataaagaaaactcagtaaaacttttgatggacaatgaaagaaaagcaaaaattctggaaaaacataaagtagatatagtttgctttaaggaatttgatcttgaatttatgaaaatgacaccaaaggaatttatagagtttttgatagttaattataatatcaaggggtttgttgtagggtttaattataaattcggatataagaatttaggaaatgtagaacttctaagagaattgcaaaatgaatatgggtatgaactatatgttatggatccacgtacatataataacgatgttgtaagcagtactagaattagaaaagccattcaagatggtgaggtttcagaagctaataagatgctcagcatgccttacacattaagtggtgaaattattcatggaaagaaaattggaagaactataggttttcctacagcgaatttaaaatatgatgaaaatttcattttacctaagattggtgtatattatactaatgttaaggtaaataataatatatataaaggaatcacatctgttggatacaatcctacggttgaaggtaaaaatttaacggtagaaacttatatattagattttaataaagaaatatatggagataaaatagatgtgagttttataaaaaaaatccgcgacgaagaaaaatttaatagtttagaagaattaaaggaccagctcgaaagtgataaagcttttgcaaaaaatgagaattgcatgtcggctttaataatatagtttacaataatagttacttttgatataataacacagggaacctaattctaagttgtaaggtgccatcttttacttggaactaggggataattaatataatacacggaggtgcacttataatggataaggcaagaaaattagaattaattaaaaagtttggaagaagcgaaggcgacactggttcaccagaagttcaagtagcattacttactgaaagaattcaatctttaactgaacatttaaaagttcataagaaagatcatcactcaagaagaggtctattaatgatggttggtcaaagaagaggtcttttaaactatttaagtgatcaagatatcgaaagatatagaactttaatcaaagaattaggtttaagaagataatttttagagcggagttttccgctctattattttaaactatacaaattatagaaaaattatacaatattattaatgattagatgaacctaaagggaggtcataaattatgaataacgttctaacgactgaaatcgctggaagagaattgaaagttgagttcggaaaagtaggtatgttatcaaatgcagcaacatttactagctatggagacacagtaattttaactaatgttaatgcatcagagcagccaagagaaggaattgatttctttcctctaagtgttgaatatgaagaaagattatatgcagtaggtaaaattccaggtggatttatcaagagagaaggaagaccatcagaaaaagctatattaaatggtagagctgttgatagaactctaagacctctatttccaaagggatacagaaatgacgttcaagttgttactacagttgtatccgtagaaaaagataatttgccagaaatcttagcaattaatgcagcatcgcttgcattatgcctttcaagtattccttatacaattccagctgcagcagttcaagtaggaattatcgatggtaaattcgttacaaatccagatactcaaggtcgtgaaaaaagcattcttcatttaacagtatgcgctacaaaagaaagagtaatgatgattgaagctggtggacaggagataccagaagatactatgatagacgctattaaatatggttttgatgagtgtcaaaagattattgcattccaagaagaagcagtagctaagtttggaaagaaaaaagatgaaccagtattatatgctgtagatccagaacttgaaaaagatgttaaagaatttgcatctgacatgattaaagaagcaatgtatatcatggaaaaagatgaaagaaatgctgctgttgatgcagtttatgaaaaagttaatgaagcatttggtgaaaaatatgctgataaaatgggcgatattaaggaagttctttacactatgcaaaagaaagttgtaagacacatgcttctaaaagataagagaaggccagatggaagagcatttgatcaaatcagaccattaggatgtgaaataggaattttacctagaacacacggtacaggattattcacaagaggattaactcaagtaatgacagttgcaactcttggctcaattagcgagattcaaattctagatggaatagatgaagctcaatcaaaacgatatatgcatcattataatttcccaggatacagtgttggagaagtaaaacctttaagaggtcctggtagacgtgaaataggtcatggagctttagcagaaagagctttagaaccattaatcccttccgaagaagaattcccatatacaataagattagtatcagaagttttaagttctaatggttcaacttcacaagcatcagtttgtggttcgacattagcattattagatgcaggtgtaccaattaaaagaccagcagctggtattgcaatgggattaataacttcagaagatttaagtgaagaagcagtattaactgatattcaaggaatagaagatttctttggagatatggattttaaggtagctggaacaacagaaggtataacatctattcaagtagatactaagcttcaaggttttagttttaatgtagtagaaaatgctataagagatgctagaaaagctagacttactataattgataaaataaacgaatgtatttctacacctaaagaagatgtttcattatatgctccaaaaacacaaattatgagcataaatcctgataagataagggatgtaataggagcaggtggtaaggttataaataaaattatacaagatacaggagttaagatagatataaaagaagatggaactgtatttgtaagctcaactgatcataatggtgttaatgaagccataaagataatagaaggattaactaaagaagttaaagctggagaagtttatcttggaaaagttactaaaataactacatttggagcttttgttgagattttaccaagtaaagaaggattagttcatatttctaagctagctaaggaaagagtgaacaaagtagaagatgtagtatctattggagatgagattttagttaaggttacagaaattgataaccaaggcagaataaatctttcaagaaaagatgctttagtagaacaagaaaataaggaagagaaataaagggcaattaattgccttttttttaactaagaaggagggcaagtacaaaatgtataacacatatacccttaaaaatggattaagaattgtaacagaaaaaatagaacacttaaattctatcagtgttggagtaatggttcagaatggttctagaaatgagagtccagaagttaatggaatatcccattttattgagcatatgttttttaaaggaactgataaaagaacttctaaagaaataatggaggatattgagaatgttggaggacagatcaatgctttcacaagtaaagaagctacctgttattatattaaagcattagatacccatctagatttaacgttagatgttctttcagacatacttttaaatgcaaaattcgatccagaagagatagaaaaagaaaaaggcgtagtaattgaagaaattaatatgagtgaagattcgccggaagatgtattagatgatgtgcattctaaagcttgttttggaaatgagtcgttaggatatcctattttaggaacaataccattggtaaagtcatttactagagaaaagatattaaattttattagtgaaaagtatacgccatataattctgtaatatcagtttgtggtaaattcaatgataaagagttagatgaattgattaataaatattttggtgaatggaaaagcaaaggtgaatatactccagaatatgataaaacaataatacaagttgattctgcatatgcaaaaaaagaaatcgagcagcttcatatttcactgggattagagggattaccttatggagatgaaaacaattacgcattagtgctacttaataatatatttggaagtggtgcatcttcaatccttttccaaaaagtgcgagaagaattaggattatgttattctataacatcttacttgcaaccatttcagggagttggaactttaaatatatatgccggcttaaatagaaattatggagagaaggccttagaggttgtagaaaaggaaattactctatttagtaagaatggaataactgataagcagcttgaaataaacaaggagaaaattaaagctaattatattttagggcttgaaagtacgagttcaagaatgttttctaatgcaaagacattcctgtttagaaataaaataaaaactcaagaagaagtaataaagaaaatagataatataagaaaagataatatacaatacgtcttagaaagatgttttaaaaagggagttataaatgcagcgtatgttgggcaagatgtagaatatagtaaattagattctataatactaaagaatgccaaagcatatgataactcaaaccataatggtaaaattaatttatagaagattatgtaataatacacctccttttctcatattattttatgagtactaaaaggaggtttttattatgagcgaagaaaataaggtgaaatatttaagtgacatagagagatacgaacttattaatataaatgatggtgaaaaatatgattatctattgaataatgatctaataatagatgaagaaggaaattttaaatatttaatagttaatttaagtggtgggaaatttaatctatttagcagtaaagattttttagaaattccatgggattgtgtaaaaaaaattggtgctaaaactatcatattagatgcagatgaggaagtaataaaaaaagtaaagttataattcaggaggaaatttaatgaaaatagttgtacaaaagtttggaggaacttcagtatctactgaagaaaatagaaagaaagtaattgaaaaagttaagagtgccattaaagatggatatagtcctgttgtggtagtatcagcaatgggaagaaaaggtcagccatatgcaacagatacattattatcattaataagcgataaatttaaaaatgctaataagttagcacaagacttattaatgacatgtggagaaattataagctcagttgttatgagtaatgatttatataatgcaggaattgatgctgtaccacttactggcggacaagcaggaatattaactgataataattttactgatgcaacttgtattgaggtgaaacctaaaaaaatactagagttagtgtctcaaggaagaattcctgtagtaactggatttcaaggaatgactgaaaacggatatttaactactttaggcagagggggaagcgatacgacggcttctattttaggagtggcccttaaagcgtcagaaattgaaatatatactgatgtagatggaatcatgacagcagatccaagagttgttgaaaatgcaaatttaattgatgtaataagttataatgaagtattccaactagcggataagggtgcaacagtaattcatccaaaagccgtagaagttgcaatggaaggaaatattcctatattaattaaaaatactatgagtaatagtaaaggaactttaataaacaactttggagataaaagcaatgacaggataatgacaggaatcgcaagccaaaagaatagaattcaggtttctataagggcagcagaaaatcaaggaaatgtaaaatacaaaaatgtattggatttattagctgcaaataaaataagcttagatctaataaatatatttcctaatgaacaaattttcactataaatcaagtggataaagagattttagaaaatgttctaaatagtgctagcttaaagtatactttgatagacaactgtagcaaagtagcggttattggttctagaatgaagggaataccaggagtaatggctaaaataatcaaggcattaagtgataataatatagaagtactacaaacagcagattctcatatgacaatctggtgcttggttcactctgaaaacgaaaaagaagcaataaatgttttacataaaacttttaaactttaatataaaggaagtttaattaaatgcgttctatgagtttttatatagagtaagttaaattaataaaataatagatttgggattcaaaaggaaaattggctagttgggtaagttcgagtaactaaatcatagattttgaatttaaaaggaaactcgactcgcttcgttcgctgagtaagttcaattagccaaatcatagatttggaatttcacttatgtataaaataattcctactgtacaaaataaaaagagtataggaggaattattttatggataaatatattttaaataataatgagaaagaaaaggaagataaaaatacatcagaagcacaggataaaatagaaaatgtaaaagaacttggaaatactacattagcaactccaaataaaagaatacaggttttatctataatagggcagattgaagggcattccgtacttcccccacaaacaaaagccacaaaatatgaacacattatacctcaattaatagatattgagcaaaatgatgatgcaaaagggcttcttatagtcttaaatacagttggaggagatgtagaagctggtttagctatttctgaaatgattcgaagtatgtcaaaaccaaccgtttccatagtaattggtggaggtcattccataggagtaccgcttgctacatcagcagacttttcatttataacaccatctgcaacaatgatagttcatccagtaagaatgaatggatttgtgattggggtatctcaaacatttgaatactttaagaaaatgcaagaaagaataaatgagtttatagttagaacatcaaatataaaaccagatactttagaaagattcatgcttcaaacagatgatttattaaatgatgtaggaacaatgttaattggaaagcaagcagttgattgtggacttattgaccaagttggaggaatacaggaagctttaagcaaacttaatgaattaatagaaaaatagtagctatttttaaggttatagaaaaaaatctatagccgatttttgtttttagtgttatcttattaaaggagaattgctattcaatgtagaaataaaattatgaggtgatttaaggtgggtaggactaaaggcaaacatagcactacaaaaagtaaaaaagatgaaaacacaataaatccagatatagtaggaatagtgtatattgcaacaggaataatacttggtatagcaatatacacttctttagctggaatattatcatctttagcgcaaagagtatcatatgtagtaattggaataggtgcaaatgcattgcctatttatttaatatattttggattccaatatataaaaacacgaggaaatattaaattaagcaagaatttttttggaataactatattagtagctgttaccatattgacatttggaacaataaacattcaaagtttagacgggcaaggaagtttttttgaaaattttaaggtcatacttaatgatagcgcccagactcctcatggtggaataatggcatatctcatatgttatccaatgtataaaattataggggcccttgggacatatatagttcttctcgcattttcaataattgccatcactttgattttcgatattactctttatgatttagggataaaggcctacaataaaggtgaaaaaataagaaatagcagaagaagtagaaaagtaagggatgagcagaaaccagttagagagaactttataaatatagtagaaaaagatgataaagaaaatgaaaaagaagcatttctttctggtgtagaaaagaagataaaaattctagattttatgaaaaatactagtgatgatacagaaatctcacctatatcaaaagctgaagtatcatcagatattcagatagagagttttatagaaaaacctacgcaaagtcatactaagaagaaagaaaacttaggtaatgatgttaaggaagtagtaaataaagagatacaagaacatataatggaacaaaaagaaactaaggagtataaacatccgagccttgaattattaaaattaaattcaaatacaaaacttaatagcagtgacaaaaaagaattaatagagaatgctaataagcttgaagaaatattatctaattttggagtagatgccaaggttactcaagttacaaaaggtccatcagttacgagatttgaacttcagccaagtccgggcgtcaaagttagtaagattgtaaatctatctgatgatatagctttagggttagcagcttctgggataagaatagaagcaccaattccaggtaaggcggcagttggtatagaagttccaaatggaaaacaaaaaccagtctttttaagagaagttctagaaaatgatgaatttatcgagtctaagaaaaagcttgcatttgctttaggaaaagatatatcaggaaaatgtgttgtgggagatttgagtaagatgccacatacactgattgcaggggcaacaggttctggtaagagtgtatgcataaactctcttataataagcctattatataagtataatccagaagaagttaaacttttaatggtagacccaaaggttgttgagttaaatgtttataatggaataccacatcttttgattccagttgttacagatcctaagaaagcggcagcagctttaaattgggcagtaaatgaaatgaccaataggtataagctctttgcagactctggagttagaaatatggagtcgtataatgaattatttaataagggtataatagaacaaaaactgccatatatagttattatagtagatgagcttgctgatcttatgatggtatgtcctaatgatgtagaagattatattggaagattagcacaaatggcaagagctgcaggtatgcatttagttatagcaactcaaagaccatcagttgatgtaataacaggggtaattaaagctaatattccatctagaatatcatttgcagtatcatctcaaattgattctagaactatcttagatggatccggagcggaaaaattgttaggaaaaggtgacatgttatattatccagtgggagaaagtaagcctcttagagttcaaggctgcttcatatcagaagaagaagtagagcaagttgtatcgtttattaagagtgaacagggtgatactaagtatgaagaagatataattgatcatattaataatgcgtcagattcaaaatctgtggatgcaaatgatagtaatgaagatgttgatgaattacttaatgaggtgataaatgttgtagttgagtatggtcaagcatcaacttcgtttattcaaagaaagttcagaatagggtttaatagagcttctagaataatggatcaattagaagaacgggggattatatcggaaaaggatggaagtagaccaaggcaggtgcttattactaagcagcagctattagaagatgaacatgaagaggaaaattaattaataatgtctaaaaagtttaaagctatagttttagattaattatgaaataaaattaaacattatgttaacttttttaatttaactcttttgaggtaaaataataagtgatttttatgagatttgggagtagtatatgtataatagcaacttgtaaaatgtagttctaatttgttataattaagactattagaacgtaggaggatataagaagttgagcgaaattaaaatagaaatagcgaagaatagagaacaatataatgaagaggcttcaagcaagtataaagttggaatggtaagcttaggctgtgataaaaatagagttgactcagagataatattaggtaagatgagtgatgaatatgagataactaataaccccaagaacgcagatataattatagtgaatacatgcggatttatagagagtgccaaacaagaatctattgacacaattttagagatggctaattataaaattaattataaatgcaaactgcttatagctacagggtgtcttactcaaagatatggagaagagttgaagacattaatacctgaaatagatataatgcttggagttaatgactataataaaataaatgaaatcataactgaatttatagatggaaataaattagcaacagaacttttaaattattccgatgaaaacattaatgaaggaaagagaattattacaactcaaagggagagtgcatatataagaatagcagaaggatgcaataatttttgcacatattgtataattcctaagataaggggaaaatttagaagtaggaagatggaaaatattataaatgaagcaagagatttgagtgagagcggagtaaaggaaattatacttatagctcaagacactactttatatggaagcgatatttatgggaaaaagaatctgcatgttcttcttaaggaattatccaaaattgaaggaattgaatggataagggtgctttattgttatccagaagagatatatgatgaacttataaacgaaattgcttgcaatgaaaaagttgtaaagtatttagatatacctattcaacatataagcgataagattttaaaacttatgggaagaaaaactagtaaaaaagatataattaataaaatacaaattttaagagaaagagttcctgaaattgttataagaacaacatttatagtaggatttccaaacgaaactgatgaagattttaatgaaattattgatttcttaaaggaatataagcttgagaaagtaggtgcatttacttattctcaggaagaagatactccagctgctaaaatggatgggcaaatagatgaagaaattaaggaaaaaagagaagaagatttaatgcttttacaaaagaatatttcagaagaaataaataaattgaaaattggaaagttatatgatattcttgttgagggatataatggaaagtgctattatggaagaagctatgaaatggctcctgatatagatgcaaatgtattatttgaatcaaatgcaaaaatagaaaatggtgaatttgtaaaggtaaaaatagtagagactatggattatgatttagtgggagttgttgttgatgaatcttgcaaataagttaaccttaattagaatatttttggttcctgtatttttagtatttatagcagttaaagatataccatatggaagttttattgctacatttatatttattttagcttcattaacggataagttagatgggtatattgctagatctagaaatcaaataactaactttgggaaatttatggatcctttagcagataaattattagttactgcggcgttaatttctttagttgatttacaggtagtaccaggatgggcagccgtagttataattgcacgagaatttgctgtttcaggtttaagatcgatagcggcagcgcaaggaagagttatagcagctagctggtggggaaaaattaaaacggttatacaaattatagcaataattttattattattaaaagtgaacattcatgatgcaaggctgttaaaaatttttgtaatagacaattattatttgaaaggattttttaaattcgctccaatgataatgcttatgattgcggttatagtaaccctgctttcaggttacgattactttaaaaagaataaggaagctgtttcttacgataaataaaatatataagatccatgtttagaaatataaaaaaatggatatgaattaaaaaggttccttctttgctagcaaagaaggggcttttcttagaattaattattgactatggtttgtaattaatttataataaatatagaacataagttcgatggaagggagttaattagtattatgggaattataaatgcagaaaaattaaaagcaattgaaagtgctatgagtcatatagaaaaacaatttggtaaaggatcagtaatgaaattgggtgatcacaatatttctaacatggatgctatatcaacaggatgtttagatttagatatagctcttggaattggaggagtacctaaaggtagaattattgaaatttatggaccagaaagttcaggaaaaactacaattgcgcttcatatagcggcagaatcacaaaagaaaggtggagcagtaggatacatagatgcagaacatgcattagatcctagttatgcccaaaaacttggagttgatgtagatagcttaataatttctcaacctgatacaggggaacaaggacttgaaatagctgaagcattagtccgttctggagctattgatgttttggtagtagactcagttgcggctttagtacctaaagctgaaattgaaggagaaatgggagattcacatattggtcttcaagcaagacttatgtcacaggcgttaagaaagcttgcaggaacaataaataagactaattgtgttgctatatttattaaccaattaagagaaaaagttggggttatgtttggttcaccagaaacaacaactggaggaagagcattaaaattctatgcatcagtgagacttgatattagaagaatagattctataaaacaaggggattcaataataggtaacagaacaagaataaaggtaatgaaaaataaagttgcaccaccatttaaacaagcagaatttgatattatgtataatgagggtatatcaagatgtggtaatatagtagatgttggagtaaaagaagagattgttcaaaagagtggcgcttggttctcttatggagatataagattaggtcaaggaagagaaaatgctaagttatatctaaaagaaaatcctgaagtggcattagatatagaaaatcaaattagagaaaagtataatcttccacctgcagaactatttaaggcagctgcaccagagggagctaaagaaaatataagcgctaaagatgatgttgctgtagatacaaaagaataaagaagatgcaataaatggaaagtttaaatgtgaatttacttcataatatttattaataaatgtatagctgcatatattatgataactcatatatatgcagctatattaagtatttaacagcataatgcagtatgtaacagttatatgcgcaaacttgacataattttgtttttaatatagaataaaaaggaatactggtttatcatattccaaatgcagtgagaagaatatgacacctactatactttcttgttaataatataatgagaaaatgataaattaggaggtgtttatgtggtaacagcagtaatgatattaatagatgtaatagttttattaatattaggaatagtggtttataaaacgattcaaaacatatcaaaagcaaagattgaatcgcttgaaaaagaagcagaagaaattctagtaagagctaaaaaggatgcagaagcaactaaaaaagaagcaatccttgaggcgaaagaagaacttcataaattaagaaatgattttgataaggaatctcgtgagagaagaaatgagattcaaaggcttgaaagaagagtaattcaaagagaagaagcacttgataaaaagagtgaacttcttgaaaagaaagacgaaacaatcaatcaaagaatgcttgaggtagatcaagtagaagcaagagtacagaagctttatgaagaaagaagagcagaacttgaaagaatatcggctctatctagtgaagaagcacgtgagattcttctagatgaaataaggaaagaaattacgcacgatgcagctttaatgataaaagatattgaaagtaaggcaaaagaagaggcagacaagagagcaagggaagtaattacaactgcgatccaaagatgtgctgccgatcatgtgtctgaatcaactgtacacgttgttgcactaccgaatgatgagatgaaaggtagaataataggtagagaaggaagaaacattagaaccttggaaacattaacaggagttgatttgattatagatgatactccagaagcagtcattctttctagctttgatccaattaggagagaagttgcgagaatggcactagaaaagttaatagtggatggcagaatacatccagcgagaatcgaagagatggttgaaagagcaactaaggacgtggaaagtagtataaaagaagaaggagagcaagcagctcttgaaactagtgtacatggactacatcctgaaattataagacttcttggtagattgaagtatagaacaagttatgggcaaaatgtgttaaagcattccatagaagtttcatacttagctggcttaatggcttcagagctaggtttagatgttactttagctaaaagagcaggattgctacacgatattggtaaagctgtggatcaagagcaagaagggcctcatgctctaattggtggagatctagctaaaaagtatcacgaatcgccattagtaataaatgcaatagcagcacatcattcagatgtagaaatgcaatctttagaagcagtactagttcaagcggcagatgcaatatcagcggctagaccaggcgctagaagagagacattggaagcatacattaagagattggaaaagttagaggaaattgcaaattcacatgaaggtgtagaaaagtcatatgccattcaagctggtagagagattagaattatggttaaaccagataaagtagatgatgctggaacaattgaattggcacgtaatttagttaaaagtgtcgaggaagaacttgaatatccaggacaaattaaaattaatgtcataagagaaactagagcagtagattttgctaagtaaaaaaagtgaagtatattttgttaagtgatgaaatatacttcgttttattatagattagatgtaattaattcatttaaactataattgagtatataaaaacaaaatacctagaaataaaaatattttttaatttagtaattctaaaaggaattttaggaattatatagaatatatttaatgtaaacgatttgtgtattaaattctaggaggaataacaaaaatggaagtattaaaagtatcaacaaaatcaaatcctaattctgtagcaggtgcactagcagctataataaaggaaaaaaatattgcagaaattcaagctgttggtgcaggtgctataaaccaagcagttaaggctattgcaatagcaaggggatttgttgcaccaagtggaaaagatatagtatgtgtaccggctttcacagatatacaaatagatggagaagaaagaacggccataaaattaatagtacaacctagataattaaaattatttctaaattatcatatgagcaatcatttttaagttgaaattatcaataaaaacgattatactataatagttaaatgctatatttattaattttttgtaaagaggtgtatataatgatagcaaaagaggttacagtaaaaaattcatctggtcttcatgctagaccagcaacattattagttaagaaggcttcttcatttaaatcagacgttagtatagaatataacggcaagaaagcaaatgtaaaaagcttaatcggagtattatctttagcagtaactaaagatgctactatcaaggttgttgcttcaggagatgacgaagctttagcagtagaagaaatcgttaaattagttcaaactttagaagactaatataccaaaaaaggttccatattattaatatggaaccttttttggtgcattagtagtataaatattaaataatttatataagtataattcttgatatcgattactcatgcagatctttaattaaagtctaattctcatccattattaaattgcatctaaatagcaatgaaaccaaatctaaggcacctaaaaatactgcaatatagataaacctctctattattggaatattcatagaaattaattttgctatatttaggttgaacaaacctattgttccccaatttaatgaacctataagaactaataaaaaggaaagtttatctaagatacctatcttacacatatttcttcactccaatctttaatatgatccttagtatatatatatgattcttagagacaataataacaaaaatgtaaaataaatttaaatacaaaagagaacaaataattctaaaattaaataggcaaaaatgaaaaaaatatgatataatacgaatgttaaaagaaaaagcataaaatatattcgtgtggaggtttttagatgagaaatttatatagcacacctttaaattcaagatacgcatcaaaggaaatgagctttattttttctgatgatatgaagtttacaacttggagaaaattatgggtagctttagcagaaggagaaagagaactcggattaaatataactgaggaacaaataaaagagttaaaagaacatatcaatgatataaattatgatgaggctgctaaaaaagaaaaagaagttagacatgatgttatgagtcatgtatatgcatatggtcttcaatgtccaagcgcaaagggaattatccatttaggagctacatcttgttatgttggagataatacagatattataataatgagagatgctttaaatctagttaaaaataaaatagttacagttctaaatcatttgaaaaattttgcactagaatataaagacatgccaacattaggttttacacattttcaaccagctcaattaactacagtaggaaaaagagctacattatggatgcaagatttagtaatggatgttgaaaatatagactttttattatcaacattaaagcttagaggtgttaagggtactacaggtactcaagctagttttatggaactttttgatggagatgaaaataaagttaagtctttagataagattgttgcagaaaaaatgggatttgaaaaaagttatggagtaacaggccaaacatacccaagaaaacttgattctattgtattaaatacattatcggaaattgctcaaagtgcttacaaatttagtaatgatttaagattgcttcaaaatatgaaggaaatggaagagccatttgaaaaaaatcaaataggatcatcagctatggcatataagagaaatcctatgagaagtgaaagaataagtgcattagctagatatgtaatagtagatgcattaaatccagcaattacagcaggaactcagtggtttgaaagaacactagatgattcagctaacaagagactatctgtagctgaaggatttttagcattggatggagtgttaaatttatacataaatattgctgaaaacatggtagtatatgataaagttatagcatctcacgtgcaaagagaattaccatttatggctactgaaaatataatgatggaagctgtgaaaagaggtaaggatagacaagaattacatgaacaaattagagtgcactctatggctgctgctcaaagagtaaaaggagaagggttagataatgacctaatagatagaataataaatgatgattcatttggcctatctaaggaagaaattctagcaattatagatccaactaagtttgttggaagagcaccaagtcaagttgttgagtttatagatgaatatgtagatcctattattaagaataatgaagatgcattaaaaatcaagagtgagataactgtataacaatataaacgttaaaattaagcatatatataaatcaaagaaatgagatacatatttatgaatatgtatttgaaagctaactgttataaatgaaagttcaaatttataatttgagttcacgaacttagttaacttattagaaattgatttaattataagtaaggttgctaaggattagcttgcaagattaaagttgaagcaagctggtccttaatgcaacctctttttatgtgctttcagaattatgttttgtagtattcaagtaaacatgtatctgacttagatttatagatataataatcataaactatacttaaactatgaagtatcttccggccagaaactggaacaaaagtatattattcatttcggtgagttatacgcataagtatagattatagtgttgggttatctatatatgatctagagtttgagatagatattgtatatcaatcgaattttaaggccctgagtgttggatatctgttgggataaatttggctaagaggataattcaatttgtcataactatgacagcaataaagacagtcaccattttgaagcctataagtaataaagccattatgaaaatatcgtcctatagacggagtgtaaaattgaattaagcagcctctatctaatgatttatcgtttggaagcttagtggcttctaatttcggcgttattaagtattgatatagttcttcaactcgaatccaggcatgagtatatggtttccaagttgcattttgactgaaacccccagcatgaattatttgagacataaaattagtacaatcccctccgatgccagaaaatgatttgtattcaggattataatttaatgaaaatctttcagcataatcgcaggcatctgtgacattaaatttggaagctcttttttcatcatggttattagtagaaagccagctagaagctatgaacatttcaaataatgaatcaattgatgaaagtttatccttatatacatttatgttgctgtttttattgaaattacggctatttaccaggcttgataaatcagtatttaggatatgttcatataaaagtggattttcttcattctctgctataaattgtattttgcatttgtcttgcaaatactctaaaatgagtatatattcatttattgaaactgaatttatattttgaggataagttttaacaataaaagaagtcttcagaatcagtttaaccttaataaaacttggaatttgttctagtatattatatgcataatcaaatttatagtctttaaatgaagagtttaatttttttgcccattcaaagttgaataatttttttaggtaaatttcttttaatatggtatcatctaaattatacttatgtttagaaattaaattgatattattataaggcattgatagtaaaaaggataaattatataaactatttgttagcatatagtttccttatttaaaattgttatcattaaatatgtttatgagggaaattatagaaatgtgttaataaattcattttttataaaattatttgtttgcattacctgattgatagtttaatatgagctttaggcataatcaaaaaataacacttcatttatttcgtatgccttaatgaactaaaattttcagaaaaatatatattaagattggtaatagcctagataatagattaaaacaacaaaaatgttcataaaaatttaaaagtagatacaaatatatttaatatgttataatgtaatatggacgaaaaaagtaatgaacttataatatttttatagagaatattgtaaatctaaaatgaaaattataaatttggtgactatacttgcaaattataattgttgtaggataaagtcaaatttgttaaagatttttataaaggagctataagaagaaatgcaagaattatctaacggaatagctagcaagtatgaagaaataattgaaaaaataaagagtttttcagatgaatatctcaatgaagattataagaatatttgtgttctagcaacagaaactttatttttgaattatgaagaacaatttaaaaaggggaagagcttttcatggggagcaggaatagtgcatgctataggaactgcaaataacttatttgattcaaaagaaaagccatatattaaagttgctgacttatataaggagtttggtgttagtagtagtacaggctctagtaaatcaaaggaagtaaaaagcttattagatatatcaaaagataataataaatggataataggcgaaaataaggatgcagaagcttcagaaggtactatgctaaaagctaaagaagaagttgcattaactatgaatgataaaatagaagaggataaagctgttaaggatgaaacaaaagttccttttaaatttgctgtccataaagattatataatggctcaaagaactattgagtatgcatggagacaaaagaattataaaaataaagcaaaatatgcaaaagaagcattagaagtatatgaagattgtgcggatgcatatataatattatcaaaagattctagtttaaataacaatcagaggacagaacttctagaaaaagcagttaacgcagcgaagaatttattaagaatagatgatttgaaaaatgcaccggcagagcttcttagattaaagatagcgaggcaactttttggagctaagtatagtttagcgattcatttatgggaaattggtgaaaaagaagctgcaatagagaatgctttagaaatcctagagtatgatgagaaagatgaattagtggttagaagtttagtagttaattggcttttaattgaggagagatatgaacaactaaaaagcctgctagaaaaatatgaaaaagataatttggcagctatacattatagtagagtagcgttattatataagattaatgaaattaaagcggcagaaagtgctttaagaagagcatataagagaaacccgcatgttataccatacatattaaaacaaaaaagagtttcaagtaccttgcctaatttaattagatttggaagcgaggaagaagctatgaaatatgctagcttaggtttagacatttggaatgatcctaagatgcttcaatggattaaagaaaagaagaaagaattcgatatcataaattttagctaatcactttacaaagataaaacttcatgatatcatagttattgtaaattaaataaagaaatcttcggggttgggtgaaattccctatcggcggtacagcccgcgagctttaaaaagcagattcggttagattccgaagccgacagtaaagtctggatgaaagaagagagtaatgttataaattatatttaaaattaaagttttaaatgttatttgttcgtatttaagtaccctgaatttattagaattcagggtttttttattacaatatatttttaagtttgaaattatataagattgatagaactggcttaaaatatatgctgtaatatataggataaattttaaaattttacttgtatatataaataatcattacaattttttaaaactccgaggatttgaatcccggagtttctttattattcattaaattataattcaactaagtatttataagattatattataggaaatagtatgaaaaattggagatgattagttttggatgagaagtacatggagatagctttagaattagctaaaagaggaataggtaaagtaaatcctaacccactagttggagccgttatagttaaagacaatgagataataggagaaggttatcatgaatgctatggagaagctcatgcagaaagaaatgcagtgaaaaatgcaacaaaatctgtggaggaaagtacaatttacgtcacactagaaccttgtgctcattatggaaagacacccccatgcgtagatttaataattgaaaaaaagtttaaaagagtagtaataggtatgttagatcccaatgagctagtttctggaaaaagtgtggaaaagttaaaacagcatgggattgaagttgtagtaggtattaaagaaaaagaatgtaaagaattgaatgagatttttataaagtatataacatcaaagattccatttgtcattttgaaaagtggaatgtctattgatgggaagatagcaacttatagtggacaatcaaaatggattacatctaaagaatctagagaagattcacaacacttaagaaataggtttcattcgattatggtaggtgtaaacacagtaattgaagataatcctgaactcacatgcagaatcaacgatggaaagaagttaatcaggattattgtagatagtaatcttagaatcccactagagtctaaagttctcacaaatagtgataaagctgcaatagtagtaactactttaaaatcagataaagaaaagaaaaagaaattaagatctatgggcattaaagttatagaagtggcagataaagataatagagttaatctgaaagagctggttaagagggttggagaagaaggaatagattcaatacttatagaaggtggaggaactttaaatttttctgcattagaagagagaattgtagataaagtaagattttatatagcacctaagataataggtggacaaagcagcagaaatagtatagcaggaaaaggcttctttaaattagatgatgcagttagattagaggacattaattatagaacgattggagaggacttagtactagaaggttatgttgctaaataagagatgaaagatataaggaggagaagatgtttactggaattattgaagaagttggcgtgttagagaaatttagcacaggtaatggctttggagttatggaaatcaagtgtagtgaagttttaaaggaaactagagtgggagatagtatagctaccaatggagtttgcttaacagtaaaagaaaaatattcagattcttttaaagcagaagtgatgggcgaaactttagagaaaagtaacttaggaaatttaaaggctggagataaagtaaaccttgaaagggcattgagattaagcgataggcttggtggtcatattgtaagtggacatatagatggtgttggaaaaatagtttccataaaagaagaaagtaatggaacttggtttactatatctgcacctgaggaggtactaagatacattatatataaaggatcaattggaatagatggaataagcttaactgttgcttatgttgatgatgaagtatttaaggtttctgttatacctcatactatagataatactatactttcatataaaaaagttaattcaaaggttaatttggagtgcgatttaattgggaaatatgtagaaaagttatttggtggaaaagaaaaagaagaaaatgaaaatagcaatattacaatggaattcctaagaaaaaatgggttttaatcatataaatcatcagaatgaattttaagtatatataaaatacaaatttaaggagctgagcattatgtttaatagtatagaagaggcattaaaggatattaaagaagggaaaatgataataattgtagatgacgagggaagagaaaatgaaggagatttagtaattccagcagaactggctaatggagagaatattaattttatgattaagtacgcgagaggacttgtttgtacgccagtggaagaagaaattgcagtgaaacttggattaaatccaatggttgaaaaaaatacggacaaccatgaaactgcttttacagtatccatagatcataaggatacgacaacaggcatatcagcatttgaaagagcttatacaataaataaacttgtaactgcaagtgaagcagatgactttagacgaccaggccatgtatttcctttgatagctaagaatggtggagtatttgagaggattggacatacagaggcatcggtagatttggcaaagcttgcaggatttaaaggtgcggcagttatatgtgaaatagtaaaagacgatggaacaatggcaaggcgtgatgatttgataaagtttgctaaggagcataacttaaagatagttactatagctgatctagttaaatacagaaaagaagaacatttaagtgttgttatggaaacggaagctaatcttccaactaagtatgggaattttaaagtactcgcatttaaagaaaaagattcctcaaaatgtcatttggctttagtcaaaggagatattaaaaataatgatgaaccaatgcttgtgagagttcattctgaatgtttaactggagatgctctaggatctagaaaatgcgattgtggagaacaatatgaagcttcgatgagaatgatagcaaaagaggactcagggatacttctgtatatgagacaagaaggaagaggaattggccttttaaataagttgaaagcatatgcacttcaagatgagggattggatacagtagatgcaaatttagctctaggatttagagaagacatgagagattacaaaacaagtgctgacatgcttaagattttagggataaagaatgttagattaattactaataacccagataaaatagaaggattagaaaaaaatgatataaaagtttcagaaagagtttcaatacaaatgcctttgaatgaaaatgatgaattttatttaaagactaaaaaagaaagaatgaatcatttgctaaatatttgataatcaaattctaataacatgttactgcatttaaagtaatattagatgagataaattaggtggaatatttgtggttataagttcaattagtatttagtttacatggaaatctaattgaagttgataaaaaataaaataaataatataaaatattggaggaaaaaataatgaatatatttgaaggaaatttagtttcagaaggattaaaatttgggatagtagtaggaagatttaatgaatttattggaggaaaacttttagaaggcgcaatagacggattaaagagacatggtgtgaaagaagaagatatcgatattgcatgggtgccaggtgcttttgaaataccactaattgctaaaaaaatggctaagagccctaaatacgatggagtaatatgtttaggagcagtaataaaaggatctacatcacattatgactatgtttgctcagaagtatccaagggaattgcaagtgtttctcttgaaagtggaaagccagtaatttttggtgttcttacaacaaatactatagaacaagcaattgaaagagcgggaactaaagctggtaataaaggatatgaaagtgcagtttcagcaatagaaatggcgaatctacttaatacaataggataagccaactataatctatacttatgcgtatagctcaccgaaatgaataatatacttttgttccagtttctgggtaattctgatgggtgattctaaggctataaagttgcacccaaagtgctagcctcaaagaacgagctttgaactagcacatttgtaacaacttatagccaaagaatcacatccatcaaaattaccaatgaaacattccacaaaagtatattactcatttctagttggaagatatttcatagtttaagtatagtttatgattgtgttatctatatgggatcatgaaaatacattaagcttataaatatatgtatatacttatataggattaaaggtatatatttttaaagaaatatatgtatgtataaaaatattttcatatgtaaatatataaatatttataggaaacatcaggtgtaagggccatttatggttataagagaacttatcatttctagcgtggcatagatatatatttgatttattatacgagtacattcacaaaagaagtcaaattacttgtgtggaggaaacaaagtaagatgtcaaggctatttggaggaagagggttaacgctttgcttattcaatttaaaatggaataagtttaagtggaaccctctttctcttaattatttcagaagttctcatagcttttcggaataaaatatttataattttggtaagctccaacacaaatatgactattagtcgtgatatataaaaagacaaaacaattattagttggatttatactatgatatattattaactagaaagtggaaacatttttatgcagcaggcatttgaaaatgagatgttaaaagttcttaattggaggttgttcaactaatgcttgtcacaatgaaattgggagcaagcattagttatgcaacctgcaatttagcgctttcagcgaaattttcatagtcctgcgaaataacaatgtctctactttcggtgaattgccgcataatgccatctatataagaaaagtatcacaacagtttgactatattttgcttgtgagatacacttaacttagatttgttttcagcaaaatcttgtgtttaatttttttggactatgcgagctaaaggaggaagttaagttggccactataaaggaaatagcttctatagcagaagtttctatagcaacagtttctagagttttaaattttgatgaaacattaaatgtaagtgatgcaacaagggaaaaaatattaaaaatagcagatgaacttgattatgtttcagcaaaggcaaaaaaagctaagaataagaaaagtaaggatataggaattatttattggtataactatgaggaagaattaggagatccatattacttatcaataagattagctgctgaaaaaaaatgtaatgaaaataattttaatttggtgaagctaagtgaggatagcagtattgaggatattaagaatgttaatggaataattgctatcggaaagttctctttaagtatcatagataaattagcaagtgccaatgataatatagtatttgtagatttttcacctgatgaaaataaatttgattcagtgatggcggatttaggaaaagcaacttatgaaatcttagattatttgtacagtttaggccatagaaagattggttttattggtggaaataaattagaatgcatagattatagagatacatatttggataaaagggacataaaatataaggaatttatggaaagcaagaatatctataataataaatacatatacgagacagagaaatttacttttaaagctggatataatcttatgaaggaagcattaaaatctaaaaataacataacagcttttttcattggaaatgatacaatggcagtcggggcttacaaagcaatttcagaggaaggattatcgataccagatgatataagcataattggatttaatgatcagcctagcgcaaagtatatgataccagctctaactacaataagaataccaagtgagtatttaggaaaagcagctgttgacttgctgcttgaaaatttgaatggaattagggaatataataaaaaagtaataataccaactgaatttaaaattagagagagttgtaagagaatataaaaaataagcagtagcctttttgtagaaaggggttactatttttttgttctaaataaatatatatatctgcaaaaataattcttcatcataattctaaaaatattgaaagaattttagccataattgtgaattgtgaaatgtgcattgtgaattgcaacatatatatttaaacttttgaagaattagataaagaaaaaatacaaaaagtatgatagatttttatcaccataaatctaacgtgaagattaaattcttttattgaaaaagacgagtttaatatttatatgaagctaataaaaaaatgctaataaccaaaaaaagtacaaatcccaatattaatattataaaattattacaaattgatatcaatatttcaataacgattactatattgaaaatgctacaatgtaaacaaatacataactaatataaatcagaaaattacttatgtataaactttaatttcaagggggaataatttatgaaacttaaaaagattatggctgcagttgtaactggcatgatggcttttagtttaattgcatgtggttcatcatcaggtggtagcaacgcttcatcatcaagcaaaggaaaagatgataaaacaattactatctgggcttgggatgatacattcaatataaaagcagctaatatggctaaagaaaaatatttaaagaatcatccggatgtaactattaacgtagtaagtatggcacaagatgatgtggtacaaaaattaaatacaggtctttcatctggaacatatgatggacttcctaatgttgtgctaattgaagattataaaattcaaaattatttgcaatcttatccaggtgagattaaagatttaagtgaaaaaatagataaaagcaaattcatggattacaaattaaaatccatgcagcaaggggataagacttatggagtaccatttgatagtggtgtcacagcattattttatcgaacagatttaattgaacaagctggatacaaaaaagaagatatgcaaaatcttacttgggagaaatatatagaaattggtaaagctgttaaagctaaaactggaaaagctatgataactatagatccaagtgatttaaatcaactaagagctatgatgcagtcagctggttcatggtatgttaaagatgatgggaaaacagtaaatattgctggtaatcaagctttaaaagatgcgattaatatatacaagcaaatggttgatgcaggaattacaaaacaagtatctggatgggacgcatttatagcagcattccaaaaaggtgacgttgcgactgtgccaagtggatgttgggtttcatcttcaatacaagcttctgaagaccaaagtggaaaatgggcagtagcagctattccaagaatggcttcaaatccaaaatcagttaatgcatctaaccttgggggtagtagctggtatgttctagataaggttggaaattcagatttggctgctgactttttagcaagtacttttgcatcagatgatgctttaatgaatgagttagttccagcaattggtttagtaagtacgttgaaatctgcaagtacaagtgaaaattatagcaagccaataaaattttatggagatcaacaagtgtttaaagatttatcggcttgggctgaaaaggttccatctgtaaactacggtctttacacatatcagttagaaagtgttatgtcagaaggaatgcaggctattgttggtggagctgacatagatgaaactcttcaaaaaactcaagctcaagcagaagcggctgtaagtaaataacagaggtaaaataaccgtaatttgaaaaatatgaatttgtaaaggctgtttgttaaaaatttaaatacatgtttagcaaatagccttttataaatcctaagggagttgaaaaaatgaaacgtaaaattggatctggtattaacagcaaagaaaacttttggggatggatttatgtagcattaggtacgtttttaataggattatttgtgtttttaccaatgatacaatctttgataatgtcactacaatcaggtaaaggtaataatttaaaatttagtggttttagtaactatgtgagaatgttttcagatgcaactttgattaaagcagttggaaatacatttatatttttaatagtccaagttccaataatgattattttagcacttattatttcttcagttctcaatgataaaaaattaaaatttagtggcttttttagaacagcaattttcttaccttgtgtagcatctttagttggatattcagttattataaagagcatatttgcatcagatggtttagtaaataaattgcttatcaatatacatttaatttcagtaccaattgaatggattacagatccattttgggctaagatattgattattatagccataacatggagatggacaggttataatatgatattttatttgtcaggcttacaaaatattgatcattcgatttatgaagcagcagaaattgatggagcatctccatttaaaaaattcatatctataacagtgccactattaaaacctataatattatttacaacaattacttcaacaattggtacattacagttatttgatgaacctatgaatatcacaaaaggtggtcctgccaatgcaacaactaccatttctaaatatatatatgacttatgtttcacatatacaccagactttggatatgcaacagcggtagcttatcttgttgttattatagtggtagtgttagctataatccaattcaaaataggaggagataagaatgacaagtaaaatgaatagagtatttaaatatatatttttgagtatagcatcttttgtttctatatttccgtttttttggatggttattagtgcaacaaataaatctgttgatgtaacaagaggaaaactaattcctgggcatagctttatggaaaatttaaataatctttttaagccagaattgggatttgcttcttcattagttaattcagcagaaattgcgattataactacaattcttgcactccttgtttcatcaatagcaggatatggatttgaaatatttagaacaaaagctagagatagactatttaacattttacttttgtctatgatggttccattttcagctttgatgattccattattcaaatttttctcaaatttaaaaagttcaccattgggctttcttggggtgaatacattatgggctgtagttttgcctagtgtttgtactgcatttttaattttcttctttagacaaaatgctaaatcatttcctaaagaaattttagaagcagcaagaattgacggtttgggcgaagttggaattttctttaagatatttttcccaactatgagaacaacctatgcagcagcagcgattataacatttatgagtgcatggaatgcttatttatggccattgattgcattacaatcaccagaaaagaaaactgttttacttataatttcaaagttagcgtcaagttactccccagattatggattaataatgatggctatagtaattacgacattaccaactgcacttgtattctttgttatgcaaaaacactttgttgcaggaatgacaggttcaataaaataaaatctaataaaagtaaaaatataagtatatataaattttaaataaaataattcattaaattatttaaatttaaaaaataagagttttataaatattggagggaaagcttatgaagaaggaatttccagtacttaatagtaaaataaatggatttttacatggcggtgactataatccagatcaatggctaaactatccggaagtgttaaaagaagatgtgcggcttatgaaacttgcaaattgcaattgcgtatcaataaacatatttggctggagtgcaatagagccggaagaaggaaaatatacatttgagtggttagataaaattatgaatgatatggcagaaaacaatattcatgtaattttatctactccaagtggtgcaagacctgcatggatgtcagaaaaatatccagaggtcttaagagtaaatagcgatagatgtaaaaatcttcatggtcagagacacaatcattgttttacctcacctgtttatagaaaaaagacatatgaaataaataaaattcttgctgagagatataaagatcatccggcgcttattatgtggcatgtttctaacgaatatggaggagaatgtcactgtgatctatgtcaagatgcttttagagaatggcttaaaagaaagtacgataataatttagataaattaaatgaggcttggtggactggtttctggagtcatagatttaacagttggtcacaaatcgaaagtccgtctgaaaagggtgagatgtttgttcatggacataatttagattggaagcggttcgttacagatcagacaatagatttttataaaaatgaaattgcccccataagagaaataacacctaacatacctgtaacagctaatttcatgggtaattatccacgtatgggcttgttcacaggtttagattattggaagtttgcaaaagaagtggatgtagttacatgggataactatcctgcatggcataacgattttgaaagtactgaagatcttgcagctaatgttagttttgtgcatgatatatataggtcgttaaaaggtggacatccgtttttaataatggaaagtactccgagtctagtaaattggcatgatactaataaattaaagcgccctggaatgcatttattatcatcaatgcaaggtgtggctcatggagcagattctgttctgtatttccaatggagaaaaggaagaggagcttcggaaaaattccatggtgctgttgtagatcactgtggccatgagaatacaagagtatttagagaagttacagaagttggagaagtcttaaaaaagattaaagaaatccaagggtcaattaaagaatcagaagtggccataatatttgatgttgaaaacttatgggctatcgatgatgcacagggattaaaaaaatatagaaagggctatgaagaaagctgtcaagcagcttataaagtattttgggaaaatggaatttcagtagatattattaatatggattgtgatatatcagattataaacttgtaatagcaccaatgctatatatgataagaccaaatgttgcagaaagaattaatgaatttgtaaagacaggcggaacttttgtaactacttattttagcggaatggtggatgaaaatgatctttgcttcttaggaggatttccaggaccacttcgagaagtaactggaatttggtcagaagaaatagattcactatatgataatgaagtgaattatatagaatttaaaaatgataaaattaaagaattaaagagccaatatgaagtaaaagattactgtgacttaatccatgtagaaactgcagaagttcttggagtatataaagaagatttttatgcggatatgcctgcgttaacagttaataactatggagatggaagagcatattatatttcagcaagaacgggagcagattttaacaatgatttttattcaaagctttttaaggatttagatattaagagtgttatagagggagaattgccacaaggtgttacagctcaaatgcgttccaataaaaataataagtatactttcattatgaatttcactgaagaagaaaaaaaggtggatttaggagaagaaatatattttgatatgctttctggagaagaaatcagtggaaagatcatattaggtaagtatggtctaaaaatactaaagcaaattaattgtaattaattattagaatgagaaaaattctttatgtatatatgttgcaataataaagtcacatttaaaattctagtaagacaagtgtttagttaaggatagaatgtagaaattaaatttcgatatatatgttaaaaaattaatatattacccccaattaagataaaatcactataaattaaaggtttgtagtgattttatcttatttataagtgaggagaaagaatgaaaattaacaatgtattaatttaatgatatactataaataaactaaataggtataaattagataaagtattttgaataaataataaaaggtgaaaggataagttatttatggataatagtaaaatttgtgttgtagggttaggtggagttggaggatatattggctgtatgcttgcaaagcatttttctaatgtttattttttagcaagaggaaaaagattagaatcaataaaaaataatggtttgaaattatacagtaatcttcatggagaattaaacgtacatcctaaattagcaagcgatagcgctgatgaaattggaataatggattatatttttatatgtgttaaaaatttttctttagaagaagtatgtaaacaaataaaaccaatgattaatgaaaatactgtaataattccattaatgaatggagttggagtatctgaaaaagtaagaaaatttataaatgatggccaagttgtcgatagtttaatatatgtagtttctggggcagaaaaagatttttcaatacatcatgcaagttcttattgtaagatacatatagggtatggcttggaaaacaatgatgaagtagagaatgtattaattagaattcaaaaaatattacaagaagctgaaattatttgtaaaatagaaaaagatatagaagctgcaatttggagaaaatatatattaaattgtgcatataacgtaataactgcttattataacgcaacaacagcagaaattataaaaaatgatgaagcagtcaagcaaactaaaatattactaaaggaatcttgtgccgtagctcgtaaattaaaaattaatatttctgatgatttagaagaagagcacttttatcacttaatgcataaccaagctggagaatcaacaagttcattaaaaagagatattgaagcaggaagacaaaatgaattagaggtcttttctggaaagttaattgaattagctttaaaatgtcaagtagaagttcctatgagtcaatttttctataatgaattaaagaagaaaagttaataattataaaatatgttttatttatagaaaactataatatgctgcatttgaaacttaatatatattctagaaattttaattcatcagagattaccttaaactattaggtgattcaaaacaaataatactataaggagtgaattatatcatttagaacttatatacaacatattatagtttttaaatttttattcttaagtaatttatattcaagttaaatctgtggatgttgtgcccattgaggatataagttatggaaaagactgattcagaaagttatggatcataaagagaattaagaagaaaatatatttgcttgcaaaaaatgttcttatattcataatagttcactattgtagcatagatactctttttataagtgcatagctatcatttctgatatacagatttttcccacatagttaattctctataaattccttttgagcaggtattgttactcttacagtagttcctttacctagttcactgctgattgaaataccatagtcatctccatatagaagtttaattctatcattaacattttgaataccaatacttgtgaaatgttcatgctttttagaggaatcattaagaatttttttgacttcttcagctgtcatgcctacgccattatctatgatttcacaaattagattttgtttttgttcatttacaaacacatgtatagatccattattccgttcattaaagccatgaaaaaatgcattttcaatgaaaggttgcaaaattaattttggaattatatagttttcgcgatttggcattacaaaaaaatttacattaatattatctccgtagcgtatgtgattaattaaaacatagttatttaaattttctatttcttcttgtattgttatcatttcatttttattactaatagtatttctaagaagcgatataaatgcatctatagtttgtattgacttttctgtactgccttgccacataagccacttgattgaagctaaagtattgtaaataaagtgtggattaatttgcatttgcaaagcatgtagttcagcttttctcttttctttttgcatttttatctgagcatgaacataattatttaaaccatctaacatataattaaagttagctgatagttcacgaacttcatagcttccgacaacaggaatatgattgttgaaatcaccgtgaattatcttaggcataactttaacaagagctgaaattggttttgtggttcttcgtattacaaagaaagtaattgcaataaatattgatgcaattaatatacttactgctataatttcagaagaatcatatatttcacttaatactatatttttatcaattgtgccaactatattgaaattgtaagttgataaatgctttgataatattgctacatcagaagagcctaatttagtgttaacgtactttaggttattatttaaaataacatttgatatattatataaatctaaattcttcgtccctatttttgaggaaaggctagaagaaacaatagtaccatcacttgatataatagaaatactatttccattacccacaaaataatcataatatttatgaaatgtatgctcgctaataagtacatatacaaatccatagggctctcttgtaagtttatcacacaaaacttttatggccacaatggtgctagaattttttgtgagctttgtaaagccatgatctaaatattgatataaaacagtatttttattatctaatgcttttttagtaaagctgctatttaaaacttcattagtatctataataaggcggtcataattacttgctgcataagtattaccattaatcccaacagctagtacagtaatatcataaagatctttatcagggatcattttatggaagcctgtaaacatattatataaagttcgataattctgttgcggtgtaagatccttttctgataaatatcgctgaaaatctgggatataatcaatcgcattcataatattaatagtattatcattaaatgtattgagttcattgcttatttgcgttaaaactttataatttgatttgctgaaagtatcagcaagtgtatcttttgaaattttaatcgtaataattcctattgaaatagatactaaaataacgcttataagaacaactgaagcaactctaaaaaacaggctcgtagaatgtattgattttgataattttatcataatgaaaagtcctttcgtttgttaataatattaatatcttttttttctaaaagtgctaggagtgattccggtgaatttcttgaaaaccttacaaaagtaactttgatctgagtagccaaccattccacttatatctgatataggaatgtcctgttttaaaaaatcacaagctttttgtattctaattttattaagaaattcattaaacccctcttcattatgagaactaaagtaggctgacaagtatgaataattaaaattaaatagcttagatacattagttaaagtgagttgttcgtcgtaatggtcatgaatgtattgaataattttattgattatatgtgaatttattttattttcatatgtgtctattatttgtttaaagcgatttaagagagagttataggccacaagtaagtcttctgaatatttagtgttatctatgtcatgaaagcactcttgctttaagtaatttaacttatctaaatcgaaatttaaatattccaaagaagtaattacattataaaaagaattttgaattaatgcttttaattcaaattctgtaagagatctttgatcaatagcatttgtaacgtatattgttagcattttgaatgcattctgaaattgcattatagaaattgattctgaaaaacgcttaaaattaaatttttctattggcgatgggcttttgaagttggaagaacacattaaagaaacatttttgttgtaaaaatattgttgagttaatactaagaattccttttcgtatatatctttaatatttctattagaatagaagaagttgcttaatacaaaaaatgcttctttaaaactatttgaaactatttctgaaatagtttctagcttactaaatagagcattataatttttatcatcaaaatttagaattacagctatgatttcgttttcaatattagcgacttgtatattataattggcatttgatccttctaaagaaaattccttgccgatttctgaaattgtaaaatcaataatttcatggcgtttgctataattatcatatattttctttgcgtttaaaccaaataagcaaaatgattgaaaagtaaatattgtatcaaaataattaaagtcaggataattgtcaaaacctgatataaggcgatttaaggcgctattggtgagacttaaagagtctccttctaaagtatttcttttcattttaattgaaatcttttttagagtacttaataactcagaaggatttagagaaggttttaaaatataatcaacagcaccattttgaaaagatgatttaacatattcaaaatcgctataactacttaagatgataattcttatcttagggtatttgccctgtacaaatttagctaattcaatcccatttatttggggcattacaacatcagaaattataatgtcaggagtatccttttttatcatttctagagcttcttcaccattagaagcctgtcctataatttgaaagccttctttttcccaatcaatcatatgagttatgccttgtcgcataataaactcatcatcaacaactaaaattttactatattcgttcaatagttagcacctctattctaaaattaccacaagatagataaatattgtttaatactgattatatcttataaattaaaggttttcaattaagtgataaattattttagtaaagtttagtaaaatataattgattttttactaaaaagataataaaatgaaactataaatttagttaatagcataaatctaacttcagaagataggataaattaaagaggtaatgtaattggttacgaagtaaggtgtcctattaatattagcccataattttttttattcttacatatgtttaagtattaattaaatgtgactttataaaagagttacatttagttaataggattaacgactttaatttaaaaaagcaataactctacaaggtgaaagtgaggtaagagtatgattaataataagccgtcattagattggctagaaaatccagaaatatttagagttaatagaatagatgctcattccgatcattggttttatgaaaaagttgaggatgttaaattagaagacgccatgcctcttaagcaaaatttaaatggaaaatggagattttcatatagtgaaaatccatcattaagaattaaagagttttataaggatgattttgatataaatggatttgattatattgaagttccaggtcatattcagcttcaaggatatgataaatgtcaatatattaatactatgtatccttgggaaggccatgatgaattaagaccacctcatatttctaaaacatataatccggtgggaagctatgtaacattttttgaagttaaagatgaactcaaaaacaagcagacttttatttcttttcaaggtgttgaaacagcattttatgtatgggtaaatggagaatttgtaggatatagcgaagatacatttacaccatcagaatttgatattactgactatttaagagagggagaaaataaacttgcagttgaagtttataaaaggagtagcgcaagttggatggaagatcaagatttttggagattttcaggcatctttagagatgtatacttatatgcagttccagaaactcatgtaaatgatatatttataaaaacagatttatatgatgatttcaaaaatgcgaagttaaatgctgaacttaaaatgattggaaattcagaaacaacagttgaaacatatttagaagataaaaaaggaaataaaatagctatatctgaaaaagttccgttttctgatcagttgactttatatttagatgcgcaaaatataagcttatggagtgcagaagagcctaacttatacacactttatattttagtaaagaaaaaaaatggtactttagttgaggttgtaactcaaaagataggttttaggcactttgaaatgaagggtaaaattatgtgtctaaatggaaagagaattatctttaaaggcgtaaaccgtcacgaatttagtgcaagacgtggacgctcaattacggaagaggacatgttgtgggatattaagttcttgaaacaacacaatattaatgctgttagaacatcacattatccaaatcaaagcttatggtacaggctttgcgatgaatacggaatatatttaatagatgaaacaaatttagaaagccatggttcatggcaaaaaatggggcagattgaaccatcatggaatgtgccaggaagccttccagaatggcaggcaacagttttagatcgtgcatcatcaatggttgaaagagataaaaatcatccatccgtccttatttggtcatgtggtaatgaatcttatgcaggtgaagatatttatcaaatgtcggaatactttagaaagaaagatccatctcgtttagttcattatgaaggtgtaacatggaacagagaatatgaaaaaacaagcgatatggaaagtagaatgtatgcaaaagcagttgacatagaagaatatttaaagaatgatccaaagaaaccgtttattaactgtgaatatatgcattctatgggtaattctactggtggattgatgaaatatacagagcttgaagataaatatttgatgtatcaaggtggattcatttgggattacggcgatcaagcgttgtatagaaaacttccagatggaaaggaagttctagcttatggaggagattttacagatcgtccaacagattataatttctctgggaatgggttgatttatgcagatagaactatatcgcctaaagcgcaggaagttaagtatttatatcaaaacgtaaaattagaactagatgcaaaaggggtgactattaagaatcaaaatctttttgttaatactgataaatatgatttatactatatcgctgaaagagatggaaaactaataaaagatggttatctaaatgtatctgtagctccaggcgaagaaaaatatatagaacttccaataggaaagtataattttcttgaagaaattgtacttacaacttccttaagattatcacaagctacactttgggcagaaaaaggatatgaagtagcatttggacaaaaggttattaaagaaaaatcagatatgaataatcataattcagggtctaaaatgaaaatcattcatggagatgtaaatataggagttcacgtaaaagatttcaaggttatattctctaaacaagaaggaggaattgtatccttgagatataataataaggagtttataacgagaacgccaaaaactttctattggagagcaacaacagataatgatagagggaatggatatgaatttagatgcagtcaatggctggctgctactatggggcagaagtatgtggatttttcagttgaggaattagatgagaagattacattagattatacttatcaattgccaacagtgccatctactaatgttaatataacttatgaagtatctggagaaggaataattaaagtaaatgttaagtataaaggagctagcggattacctgaactgcctgtactaggaatgaattttaaattattagctgagtttaattcatttagctggtatggaatggggccggaagaaaactatatagacagatgtgaaggggcaaaacttggaatatatgaaagtacaccaatagaaaatctatcaaggtatttagtaccacaagaatgtggtaacaggacaggaactagatggttagtagttaaaaatcataagaatgagggtcttaaatttacttacgataaagctccatttgaatttagtgttttaccatacagcaacatggaattagaaaacgcacttcatatagaagaattaccatatgttaattttactcatgtgaatataataggtaaacaaatgggtgttggaggagatgatagctggggagcaccagtattacctgaattctgcatcgattcaagtaaggatttagaatatagttttgcaatttctaaaatgtaatacgcacatataggaactagagatatccaaaacaaaacttagacttatgcaataacttaccgaaaggacaggtactctgttgtttcggttactaagaataagttgaggctttctaacataataagttgcaccatttcagcatgctcccgagacaagctcgtgacaagcaaaaatggaacaacttatgaaattaaatttttagcgactttgtaaatatgttaatctaataaatcgaattcttaaattgtttgtctatatagataagccaattataagttagatttatactatgaaatatatcccaactagaaactggaacaaaagtatgttattcatttcggcgagttatatgcataagttcaggtcttagttggtttatctataaaatgttataaattatataaatgaaaaatatctattagataaacatcggttaagagattctagaagtatatatttctaagtaaagaaaaaataggatgcccataaaagcatcctattttttatatcatataagtttatcataatttcattaattaggataaactaaatttttctcggttatatttaataagatatcgttaagaaatttatttgccaaatattttgccattggtaaattcatatctaaatagtttccacaatctttagcagaagcaccaggaatatctccttcaaattcagccataaatttatatagttctgtaagtagaggaactatatctttagatttataatcaccatgtaaaatcaaataaaagcctgtcctacatcccattggtccaaaataaactgttttatctgcataatctttatgatttcttaagaatgtagcagctaagtgctcaattgcatgcatttctgctgtattcatagttggctcaaagtttggtctattcattctaatatcaaaagtcgtaagaactgtatcaccaaacttatcttgtcttgagacatatacaccaggaagtaattctaggtgattaattgtaaaacttgctatcttctccattaacgtcactccttaatataatttagaataaatgctcaataatatactataatagttacatctattagaactttatttaaatttgtttctattaaattttaacacttgtaatttctattatcaataacatgcttatatattagataattgttcagaaaaccataagaagtgttatatgaagaagaacttataattaatagagaaaaatatgatacttttaaatgaccaaagatcatatcagtgatattatcttggtaaagaatgaaaaacaataagttatagaaattataaatttagaatattatttgtaggaatttgaaaggagaaaaaatgaattatttagcacacatatatctcgcagataatagcgaagaaaatatgttaggaaatttcttaggggactttgtaaataagtctttggaaaatgaatttgaacaatcaataagaaaagggattattatgcataaaaagcttgatacctttacggattcacatccagacttcctaaggagtagaaaaagaatttcaaaaagtaatagacgcttggcaggtgtattgattgatatattttatgatcatttcttagctaaaaattggaaggattattcctcaatatcattagaagagtatgctgataatttttataagatacttagaaagttttcttactgtctgccagataagttattaagaaggatgaattatattatagaagaaaactggctcatttcttacagagatatacatggcattcaaacagcagttgataggattgctacaagatttgtcaacacaaggcacccattagtaaatcctatagaggagttaattaataattacgaatgtcttgaaagtgactttaaatgtttttatcctcatgcaattgattattcaaataagcttaaaataattctttaatgacgtgattcatagtatttagagttaacataaagtatacaatgtatttaggaaattaaacgaatatattgtatattttttatgtttagaatattatagcttatcataggaaaacataattctattgatatgctaatctctaaaactagatgaattaaagtgtaatggtcttatattgctaaacttatctattatgtgtggaaatcttcaaaaaaattaaatattttgataaaaatatttaaaaaaatataaataattgaagagaaaaaatatagtattatatgaaaatcgtgttataatattgcttgtaaaatataaaaggaggtgcccttatgaataataaattgtccaaagatgcatatggcggtgtagccggcaagagctatgttccatacatttctaacggttcgaagtcgggtggaaacgtttcagttttgataatcggtattatattggctgttctatttgcagcatcaacggcctactcgggaatgaaatcaggacttacagttgctgctggtataccgggatctataatagggtctgggtttatagctgtatttgcaaagcaaaaaggcatacttggtaaaaatttagttcaaggtatgtcaagtggtggagaatctgttgctagtggtgtaatattcgtattaccagcaattcttttaataggctctaaagttagtttcatagaaggtttttctgttggagcagctggagttttatttggtataggaatagcttctcttgtttacaattacttaattgttgaagaacatggtaaattaatgtatccagaatcaatggctatatctgaaacacttgttgcttcagaaggtgctggagaatcaatgaagttcatgggaattggttttggaataggaggtattataactgttataacaagttcatttttgaatttagttaacaatgttataagttatgtaaatgagtcgttttataagtggaaattcgaagttgaagttaatcctctactattaggaatagggttcatagttggtatggaggtttctttaactatgtttgctggagctatactagctaactttggaattatgccattaataggttacttctcaagtcttggaagagatggaggatctgtgtggaataatcctaatgttgctataaatgctatgcaagttaaagatatagctggtagctatgtaaaatatataggggcaggaatgatgctttctggtggtttaataggcgctataaaacttattccgactataatatcttctataaaagaaactcttaatgctaaagcttcaaatagtggaaagagttcatctgttgaaaatatgatattacttggtggtataatattaggatttgtaggtggttttgtagcatctaatggtaatatagtaatggcaatacttgcttctattttatcaatgtttttatcattattatttgttatagtttctggtcgtttgactggtactataggaacttcaaatcttcctgtatcaggaatgactatagcttctatagttattgtgacatcattatttgttgtaatgggatggaagagccctgaaagcaacaaatcactacttttatttgggacatttattgttactgctatatcagtagcaggcggttactcacaatctcaaaaggttacttttgtaataggtggagacaaaagagaaatggaaaaatactttgcaatagctggaattctaggtgttgcagtggttgttggtactatattattactttcagatcaacttgcaattactggtgataatgttccgtttgcattaccacaagctaatttaatgtctacactaactgctggaataatgtcaggccaattaccttgggtaatggtaattgctggtgttgttatgggacttgttttatttatgttaaaccttcctataatggcagttgctataggattctatttacctatatctacaactactataatattggcaggagcattggtacgtctatttatagaaaagaattctaaatctgaaaaggaaaaagaagctaaagtttcaaatggtataagcttatcttctggactagttgctggaggttctattcttggacttatagggataatattccagatatcgggtcttgtaggtggagctgaaccaagtggatttgcagcttctaatggaatggcattcatattactaatagttttagtaatagcaactgcaataccaattctaaagagtaaggtaaaaaatgctggaaaataataaagatgttttagaattagtatataaaatatctgatgatttagagtatgaagtggataaagataatattgtgactatacttttaaaacaagaccataaggtccaaaggttctttagaaaacttaaattcagaattccagagtataaaaagattactttagatgaatatggaagctggatattattgcagatagatggaaagaaaaatgttaaagacataggagaaagtctagaagcaaaatatggtgataaggttcatccgctttatgagagattattattatttttaaatcatattgatgttaattgccactatatagaaaaagtgaattttcaaaattaaatatgatattttattatacttgtaataaattataatatataaaattaaagccatagagatttgagtttctctatggttttaattttttgtatacattctagaaagggataagtaaatattttgaatattatcatgaagttcacgatctatcactatatattgtgactatgcatcaatgaatagtggatttattattttagtaatatcaagcaattctgtttcttacttgttaatataaaattgaatatgtttgaggctaaagaggtgtgttagaataaaagactatttctaaattctaatttgactatagttaaaatttgtattatattaaaagtagatggaaaactttgataaattggcaataaaaattcgaaagcgttaacaaattcgttattgggggactataaatgaaagaaattaatatgaaatatggaagagataaaatgagggcttttattgaagaagaaaatcttttggagataattgaaagcaacgattttaaaaagagtaagacagaagatgaaattatagctgaggcattgtataatcctattgacagcgaaagacttaaagatattgtacatgaaggtgaaaaagtttgtataataatttcagatattacaagaagttggcaaaagccatataaatttttatataaaatcgtagaggaactaaatgaaggcggagttaaagacgaagatattatatttttatctgctcaggggactcatagaaaacagacaagagaagaacatgaaatacttcttggagaaaagctatcaaaaagatttgaagtttacgatcatgattgcttcgatgaagaaagtatgacatatctaggggagacaagctatggcactcctgttatgttaaataaaaaagctgttgaatctgatcatatagttattacaggagctatagtctatcattttcttgtaggctggtcaggagggaaaaaatctatacttcctggtattgcatcatttaaaacaatatcagccaatcattcactttcgttaaatgatggatttggaagcgggacaagagagagtgtgtgctcgggtaatattatagaaaacccagtacatgatgatatgatgcaagcagcagcaatggtgaaaccagcatttatgtttaatgtagtcatgggacctgatggaaatatagctggggcggttgctggagactatataacagctcatgaggcaggaagaaaattggtggatagtattgacggcgtcaatataagaagtaaatcagatatagttattgcaagtgcaggaggggcaccaaaagacataaatctttatcaatcaataaaaactttgataaatgccaaagaagcggttgtagaaggaggtaccattatagtacttgctgagtgcagtgagggaattggagaaattaaagatattaatgatatgatattaaattttgacaatatgcttgatagagaaagagatcttagagagaattatactatctcaaaatatgtagggtactttttctgtgaaacaggagaaaagtataggttaattttggtttcagaaattgatcctgatttgctaaagaatacaaaaattattgttgttagaactttggaagaggcacttaaaatttcttatgataataatcaaaataaaaatcctacgattaaccttatgcctcatggagcgactacgcttcccaaattagtttaaaatagtattggtcataaattatgaagtattttaatgaaagcacaactgttctttatatggaagttagtgctttttttcttttatgagactaaaatctaatggatataaatactttgttaactaggaaaacataaaggtgaaaaatcaaaataatattaatggagtagttttttgagtaataaatttaatagtgaaattatagaaaaagtagtggcgaatcaaaaaatattcttattgtaaaagtctgcattcttatataaaatatgctaacgtatataaaaatatttataaacctcaacttaagtaaatgtgaatattttaccaaatttttaaggagaatagaagaatagagaagaaaaactaatttaatgtattatcacagcatatatgaggtttgttgacggttactaaaagtgctataattatgtataacaggggatgacaaagggggaaagggttgtaacaaccgacggtattatgaaaaataaggttttagcacttatattagcaacagtaatcactacaagtagttccatagctgcttttgcagcacctgataatgcacagttggatgcttctagacagaaatatgcggaaatagaaaataacataaaagatattgaaaataaaatttatgatttagatactcagatggagccattacaagcaactgtggataaaaataaaatagagatagataatattaataaaattactgagaagacaaaaaaggatattgagcaatacaaaaaagacatcaatgatttagatctagctttaggacaaagagttaaagttatgtatgcatcaggagatttggaatttaattatttaaattttgtcgttaactcggattcaacaactgaatttttttcgagattgcaggctgttagtaagattgtagggaaagacaagtcttacatagaagatatcaataacaagaaaaatgaattaaatgctaaaataaagtcattagacgataaaaaagctgaaattagcaagcttaacaaagaaacacaggataatttaaatcagttatcacaaaaaaagaaagaagaagaacaattagctaatcaggctaaggcagaaaaaagtaaatttgatgaacagtatttatcacaacttgaaagagacgctgtaaagtatcagtttgatataattgatagttcaaatagttcatcaacagagattcaaggagcagttaaccagttaattagtattagggatagtcaaattaagagcccaattgttactaaggaaatcaatgataaaatagaaaaaggaaagacagccgcggctaaaaagaagcaagaggaagataggattgctgcagaaagtgtaaagcaatcagtagtagcttcaaatgtacaatcaagcgtcaaatcaaagagtagtcagaaatcaagttcatctgtagctgcgccatctggaggtagtgcacaagcagtccttaatgaggcatataagcatttaggagcatcttatgtatggggagcaacaggaccaagtacatttgattgttcaggatttacagaatatgtttatgagcatgctacagggatagatatttcaagaacaacttatacacagattgatgttggacgacctgttagtgaggatcaacttcaacctggagatttagtattccctcatgctggacatgttggaatatatgttggaaatggacaaatgattcatgcaccacaaacaggtgatgttgtcaaggttggtccagtatataacttttacgcagcaagaagaatactttaaagcagtttttatatgaggttaaagtataatgaaaaatataaattaatttagaatacatgataaggatagagatttggtgcttctatccttattattttttattctttaggaaagtatagtgtagtaaaatctgtggacgatgtactcagttagggcataattcttcaaacagactaattgattcggcttatgattttaaaagaataaaaaatactgccagacttttcttaaatacgctcgcaaaggaagatgcataaaaggtcgccagatccaaagtcgtctgcgattttgttctgctgatatgtattattggaataaatgcttaaaagttataaatttaagttagattaatgggaggggattgatatgagagtaaactacaaatatttatacattttcatagttttatttttaatagaagtatatattggagcttttatacatgataatataattagaccttttattggagatgtattagttgtatgcttaatttatttttttatagtagtgtttactaagaaggtttcaccaatatatgtttttatatttgcttgcttaattgagataggtcagtattttaatttggtttctcttttgcacatggaagattttaaaatggctaaaataattattggatcaacttttgatttttgtgatatcatttcatacttaataggaacaattcttatatttatatataaagctatagaaaaaagaaattgcagaaattaactaaagattgaaaggaaaaatataactgtccaccaaattgtggacagttatatttaaataaaaagttaattcagtaatgttattttggagttcgttttaaagttgcatgattatattttcctatgaataaaggtactttttcaacatcaacatcactattttcaaggccaaaccactttgttggtgaaacagtatatctttttatgaatagtttggctttgagtattaattcttcccagaaattcaaatctgtttcatatgaaagctgttcttgaattagaaggaaacgaaaatctccgacttttctgtctggcatagttgtatagtttctagattgaatctttatttcaccattttcaactaactcagttgaaatttgtcgtagaaagacattcaatttttgttctactctaaatccaagtcttatttgaacccttacaatatataatgttcctaaagtatctaccgaatattctgctacataaggctcatcagtaacagcaatattaacaaaccaataaacatctgcttttttaggtcttttgtctaaaatagaatacattatttttctttcgatttgttcaggatcatggctgctagttaaacatacaaggttagttgtatacttaggacggtcactatcttggcgtaattgattaagttgtgttttataattttcaattgggacatgttctaataaacgcatcttgatataatagcctttaatccaaatatacataacgcttaagattgcaagagcaattaaagcagcaataaatcctccgtgagtaaatttaatgatatttgcaatgaagaaagaaaactcaaatgcactaaagaaaacaaggattaatacagcagcaatgagcggtgtttttttcttcaataagtaattaaataaaagaatagtagtcattaacatagtaacagtaatcgataatccgtaagctgcttccattcttgcagagtttccaaagtatagaacaattccgatacagacaatccataaaaatttattgatggaaggtatgtaaagttgtcctttagtgctagatggatacataatatgtaatcttggaaataaattaagcttaattgcttcagaaacaagggtaaaagaacctgaaattagcgcttgtgaagcaataattgccgctaaagttgaaattattataccaaaaattaaaaaagaaggtggaatcaattggaaaaatggatttaaaccttccatatttgtaaaagtgggattatgtctagctgataataaccaggctccttggccaaagtagttcaatagtaaacatatcttaacaaatggccaagaaccataaatattatatttaccaacatgcccaagatctgagtaaagagcttcggcacctgttgttgctaaaaatatgctaccaagtataaagaaacctgctttattttcactgctaaaaagagtgttaattgcataatatggagatagggcacgcaataatgtccaattgtgggaaataccgataatcccccatatagctaatacagagaaccagacaaacattattggaccaaacatttttccaatcaaatcagtcccaaagtgctgaatgaagaaaagagcacttaatattattattacaatcgtaacaatatcaacttgacttcctaaaacagcactaaaacttggaattaaatctaatccttcaattgctgaagttacagttacagcaggagttagcgttccgtcagccagcaatgctgatccaccaatcattgctggaatgataagccattttgcacgatttctaaccaaggtaaatagtgaaaagattccaccctcaccattattatctgcatttaaagttataaggacatattttattgttgttaaaattgtaattgtccaaaaaattagagataatgatccaagaataaagttttcagatatattcttcaagccaccattaccttcaataattgatttcattacataaagtggtgaagttccaatatctccgtaaactacacctagtgctataagtattcctccagcactcagttttgcaacatctccatgtttcgtagttgatttcaaattaatcatcctttacatcaaatatagttatatataattcctaaaattaaataaatgaaatttaaatacttgtctaatttacttttaatatgtaaagtaggtaaattaataattattttaagaataattattataataacattgttaaaaaatattagtcaaaccattaaaaattagataatacagtgaatagtgccaaatccataggattttagcccttatatgaggatttagactgatattgataagaagctaataataagttgttcgcttatgagtttagtatgctgcaagcataataaatatatttatagaaataataaaaacgaaataatttgttacagaaatttatatctataaaaataatttacccaatttttaaaaataaatcagagttcggggagataaatttatgaagaataagccttatgataaaagaaacagtattagtagtttaggaagtgatttgactacagcaattcagaattttcatcattctggggaagaaattaaaaaaatcactaataaaaaggataataaaattgagagataagtgattttctttgaaactgttttggttaaaaacttatatatattgcgaaaataataattcattataattctaaaaatattgaaaggattttagccgtaattgtgaattgcaacatatatatttagagaaaatcagcttaaataattctttagaaaggagaatttaactaatgagtagaaatagtgaaggcaataaatttaagaatattatgagtgttggaaatttcactaaacatgcagtagaaaatttcgaagaaaatatagtaagtcaaaaagattatttagaaaaagttaaggaaaatgaaaaatctagagaaaaagaatagttctaattaggaggtgagaacatggaaaatatactaggttattatttaatgccacatccaccaataattatacccgacataggtaaaggtgaagaaaagaaaatagaggaaacaagcttagcatgtaataaaatagggagagaagtagcagatattaaaccagatacgataataattataacacctcatgctacaatgttttctgatgcaatagccatatcagatgaagaaaaaatttcgggagatttaagccaatttagatgtacaaacataaagatggatattcctatagataaggagtttaatgttaaacttcgcaccgaatgtcatgtagagggaattccgtcagtccttgtagattcagaattattacgtagatataatgttaattatgaattagatcatggaagtatagtcccattgtattttattaataaatattataaagactacaaattagttcacattacttactcaatgataggggatgtcaatttatataaatttggtatggagataaaaaatgtagcagaaaaattaaataggaaagctgttattatagcaagtggagacctttcgcataaacttaaagaggaaggaccatattcatattcaccatatggagaactatttgacaaagctcttttgggtaaccttgaaaaaggtgatgttttaggagcttttaatatgaatagaactatgattagcgagtctggacaatgtggattgaactcagtttatatacttcttggagcaatggaaggcaaagaaataaaaggagagcttttatcatatcagggaacttttggagtgggatatggagtaatgaaacttagtagacagcaacaagataggaactatttagacgagctaacaaaatataaagaagaaaaattgaaggtgaagctaaatgagagtaatgcctatgtaaaacttgcaagggaaaatttaaatcattatttttcttacggaaaaagtatagaagatatttctaatttgccaaaagaactcttaaatgaaagacacggtgtttttgtatctttaaagaagtttggtaatctcaggggatgtataggaacaattgcaccaacaacaggttctgtgggtgaagaaataataagaaattctatagaagcagctatgagtgatccaagatttccagaagtttcagaagatgaaatggatgatattgatatatctgtagatgttcttatggattcggaaccgtgtaataaggaagatttagatcctaaaaaatatggagtcattgtttctttaggaatgagaagagggttattgcttccggatcttgaaggcgtggatactgtagatgaacaattacaaattgcatgtgataaggcagatatagattttgacgatgattataagatagaaagatttgaagttgtaagatataaggaaggataaacaataaatctatttaaagttaaagattttaatagtatagttttaaaaatcaaagatatttatgaataacttatactttatttaaagaaggtgataaagagtggaaaaaaaaataccgttttatgaggaagttaaggataaagtgagatgtaggatatgtccacataattgtttaatagatgaagataagtttggaatttgtggagttagaacgttggaatctaaagtccctattgcaataaattatggagaagtaacttcaatgggagttgatcccattgagaagaaacccttatatcatttcaaaccatcaaaagatattttatcaattggaagctttgggtgtaatatgacttgtagcttttgccaaaattatgagatatcccagggaaagccacaaacccaatatataaacgttgaaaaactaataggaattatcccaaccatagaaaataatattggtattgcatttacttataatgaacctttcatgtggtatgaatatatgtatgatgctgcaaagggcataaaagagaataatactgatacgagtgttgtggttgttactaatggctatattaatgaatagccgcttaagaagctccttccttatgtagatgctatgaatatagacttaaagggatatacaaatagatattataataatatttgtggcgcaaaacttgagcctgttctagaaactataaaaaggtgcagtgaatactgtcatgtggaaattaccactttacttgtcagtgaagaaaacgattctttggaagaagcaaggcaaatagctgaatttatagctagtgttgatgaaaatatacctcttcatttaagcagatattttccaagatataagatggagaatgaggctacaaaaatagaaaggataacagaagctcaaaatgaagcaaagaaatacttgaaacatgtatatgtaggaaatgttcaaggagttgataataatacttattgtgataattgcaatgaagtgcttattgagaggagtggttattcaactaatgtatttataaaagacaataagtgcccaaaatgtggtgaggaaataaacataatattgtaaaataagatttaaactttaaattaatgattatagaaattgtagcaggagaaattaaagctcctgctttaattattatcggctagttactgtaaatggattgaatttaatggcaccattatattgataaggataaaattgctttaagtgagaaagataatttatccattgagaagttaatgccctataaactctgcaaatatccccttttatgtgagtagagtcatcttttgtcagtgttttatattgtaaaaatactatttcatctcttaaatgcattagagacataagtaaatcggcaaaggtttcatgctctaatatattctcattacttataaggttagatagaatatctctactttcgagaactagtttttcaagtctaggataattaatcttttcaaatgctattatatgttcataagattttagtttattattagaagtttttaagtctgtaaaatctagatttaaatattgtatattcgcatcaccagctactattatttccaatagagtaaaaccaatatcactaaaaaataatccaactaacatatttaatttgcttaaacgctcaagtttagtacgtctttctacaagcttctcaaatactagggttacgactaatatatttatagggataaaacagaggctcataaaagagtaataaatcgtgttttctaattgcccaaatactaaatagtgaataaaaaacattataaatgataataaaattaaaataaatgaaactaataaataatgtgtaatatttttcataattgctcctttaatattagaatttatatagataacaatagcatgtctgacaagttaagacaattatatttaaatattagaataataatcatttgattgcactattatgtcatatattggatttgaattgagttatatgataaaatttataaatattatattttgtctacaatacatgtagatgaacatcggaggtaagataatgagtgagaatgagtttgagcagtttttacataccaatataccaattacagaagctatgggcataagtgttacagagtttactaagtcgagagttagacttgctgctaaattaaaacctaatataaatgataaattaacagcgtttggaggaagtataaatactttgatgacaatatgcggatggtctatggtttttgtaaatattaaagaaactgacccaaaggctcagatagtaattaaaaaaagtaatataaattatagagctcctatacgtgaagatttcactgcagaatgtgaaatttttggtgatgaaacaagaagagaatttctcgaaacatacacgaaacataacaagagtagattagatcttaaggttgttattaaaaataaggaaactgttttcgcagagtacgagggacaatatgttgtatttaaatagaatagttatggataaatttacaagtataaatagatttattatggaggaaaaataatgggaataaaagctatgcaccatgtgtgcattcaaactaatagttacaaagaatcgcttgaattctataaaaatattcttgggtttgagattgtagaagagacaaagaatttccatactagagattataatacatggttaaaactaggaacattcatgattgagttacaaactagcaagaagggagaaaatctttctaagtggaataagttaagcgaaggaatagttcatatgtgctttttagtggataatgttcaggaagaatttaataggattaaaagtttaggttataacaattttagggttaaaaataatgaagtaatatataaagttgaggatagtttcttatttaaactaaaggctcctgagggtacagaaattgaatttagagataaaaatgaaatatagatttcatttatcatctttatttgaagagattgatagcaaacgctaacttatattcatatcttacctaagaataatagttttaggtggtatgaatgagaaaaagctttgggacagttttaaattgtattgacggaaggactcagattccagtaataaattggataaaagaaaattttaatgtggagtatgtagatttaataactgagcctggaatggacaagatagtgtcagaagggaacccgttttattcaagtagattaaaagataagatcaatatttcagttaaggctcataaatccaaaataattggattggtaggtcattatgactgtgctgcgaatccagtggatgctgaggtgcattataagcaaatagaagaagccacaaatttgattaaaaattggaatttttcggttgatacaatagttggtttatgggtagatgagttttgggaagtacatgtcgttagcttgtataaaagaatttaaatatagaacatatataaattaggagcagatgttaattaatctgctcctgtttttgatgcacaaatatattaagtacaaagatttaagataaactaaaaagtttatataaaaaatatcaaatgtatcctttttgaattttataggcgacttaagcagaaattacaaagtatatttttagtgccttagaagaaaatatattttgttatcaataaaataataaagaggaaacaaaaatggaagcaactatgaccagacattcaaattcattaatatcagaaggaaatccaatgcaatattgcattgatgcttgcagtaaatgtgtgcaaatatgtgaggaatgcttaaatttatgtttacaacatagtgatgctagagataggatgtattgtattaaatcacttcaagattgtgctgaaatttgctctacaacagcttgttttatttcaagaggaagtggtcatataagagaaatagctactgtatgtgctgccgtatgtgaaagctgtgcaaaagaatgcggaagattcaatgatgaacattgtcaaacttgtgctgatgtatgtagtcaatgtgctagcgaatgtagacacgtattgaatatgtaaggcattgtttgatttaaattacttcttattttaaacataaaagtttggaaagtattaaaaatcgctattttaaagttgaatagcgatttttaatacttttaataattaggagttatgtattttttactagattaaaaacaaataaattatgttttaagtttctttatgtagattttaaaagaaaattaacatttaataagataaaattggtggaatatatattgacaataaaagaatgttcatttattatagaaatataataatagaggtgtttaaatgagaaggaaagacgatgaaaagcaaaagaacataaaggaagcagttattaaattaattcttaaagaaggctttcacggtacgtctatttcgaagatagcaaaagaggcaggggtatcacctgctacagtatatatttattatgaaaataaagaagtcatgttgcaagacatatatcttgaatattctgaagatatttttgattacatactcagtaaacttaacaataagatgaatggtcagcaagttattgaaattattgttaaagagtattttatttatattagggagcatggagaagtctttcatttcgtagatcaatttgctaattgtccagctttatcaaatcaatgtttgactaagaggggaataaataacctaaataattttcttgatgaaatgaaagaaagaaaagtttttaaaaatcttcaaaatgataatttaagagcaatacttttttatccagtaaaatcaattgctattaattcatgtattgatgaaaatgaaaaaattgagttgctaaaggaactcattagaatagtgcaagaggcattacttatataattaaaaggactgtgtttagtgcgagagattttgtgaaatataattgcagaagtatctcgctattgcttaactaatctttaaatgaatgctcgtttaagaatgttctaataggaaggatgattattatgataaatttagatgataaaaataatataggaagagtaattcctgtgtcagatatagtgttattacctggaatgtaccatacactaaaatttaataaatttagtgaaactcaaattgaaagtttatcagatgaagatatagttaatattgcattacctttaaaacaaaactttggtcaaagtaagttaaaggaagaagattttcatagagttggtgttacatttcaagtaaatgcaattgaaaaaacagaaaagggatataaagctgaaattaaaatattagatagagttgaaattaaaacatttagtattgaggaagattctattaaagccgaattcgaatttgcacccgatattattgatcttacagaaaaaagtaaggacgaaatggtagagtatattaaaaaagttactcgtgaaattagtgagaattttaagggatcagaaaagtttatgttggctgtagaaggtcaaaaagatttgaataagcttatgggatatttatctcatttcatgcaaatttcaagtgaggaaaaatatgatttgttggaaactcaatcattaaaggatagaggtcttaaatttatagattatttattaaaacaaaaagaatctttaaaattacaatttgaattagcagaaaaattcacagaaaaagctaataagaattatagggaaacagtattaagagagcagttaaaagctattcaagaagaattaaatgaaggaaaaagctcaccttctaaaaaggacaagaactacttaaatagaattgaagaggcacaaatgcctgatgaaataaaagaagttgctttagaagaattaggaaaattagaaagccaaagtccaaatagtgctgaatacaatgtgattaaaaactacttagaattattaattcagcttccttggaaaaaacaagaatttaaggacattgatttagaagaagcaagaagaatattagatgaacagcattatggattagaaaaagttaaagatagaataatacaacatttagcagttatgcagcttaaaaatgataaaaagggttctattctactattagtaggtcctccaggagtaggaaagacaagtttaggaaagagtattgcagaagctttaaacagaaaatatgtaagattaagcttaggtggagttcgtgatgaggctgaaataagagggcatagaagaacttatgtaggtgcaatgccaggaagaattattcaaagtataaagaaagcaggagaaataaatccagttatggttttagatgaagtagataagttgatggctagctataatggagacccagcaagtgcattattagaagtactagacccagaacaaaatgatacttttactgatcactatttagatgtaccttatgatttatctaatgtattctttattgctacagctaactctctagatactataccaaggcctttattagataggatggaagtaattcaaatttctagttatactatgaatgagaaattccatataggaaagaatcacttgatatcagcagttcttgaagaacacggattaaatgatactcagcttgttatagaagatgcagcattagaaagaattataagtgaatatactctagaggctggagtaagaggacttaaaaagcaaatagcaactattgcaagaattgcatcagaaaagattgtatctaataaggtggaattaccttttaaagttaaagaagatgatttagaggacttattaggaagaaaggtttcaagccatgataaggctcaagatgataatgttccaggagttgtaactggattagcgtggacatctgtaggtggagaaatacttttcattgaagcgacaggaatgctaggaagtggacaaattgtcttaactggacagctaggggatgttatgaaagaatctgcgcaaatctctttaagtttattaaaatcaagattgccgattaatgctataaactttagagaaagagatattcatattcatgttccatcaggatctgttcctaaagatggaccatcagcaggaattgcattatttactgcacttgcatcacttgttacaggcataaaagtggattcaaaacttgcaatgacaggagaaataactctaaggggagctgttcttccaataggaggacttaaagaaaaattattaggagctcaaagagccggaattacaaaagtactaattccaaaggataatgtagttgatttaaatgaggttccacaagaagttaaggaacaattaactattatagcagtagaaacagtagaagatgttctaagagaaacattggggatttcactaccaagaatagagcatatatttaatcctaataaatttattgaaggaactttcaagccagcagaagaataagaaatattaagagatgttgtgaaaaatacttattgacaagtagaagaagcaacatctcttcttgttttttacaagaacggaaatataaaaatttctagtcgtaaaaagtaatgagactaattgattataagtatcaatggtcaaagctggctttttgttaaatcaataattttatgatttaacaatactatttaaaatcatacctattactattagtactatgcctgctagtccaacaaatgttggacacttatcgtgaaatataaatactccacctataagagtaaatattacttctccggattgtgttgattctacaacggctaatttatgcgtatcattacttactatgtcggttgctttaaaaaaaagtattgtggcaataattcctgaaaaaatagcaacgactaaggattgaagtaattgtcctttacttggcataccagcagataataccccgaatattgatattaatatccaaaagggcatactacataaagtcattccgaatactctctgaaaggtattaaatttatcatcgcagatttccatcatcttgcgattaccaagtgggtaagcaaatgcagctagaataacgggaataactacagagattatttctgaaaaagagacattttttgattgttcaagctgcattaaaaatatacctagtaatattaaagaggacattaacagggattttttcggaagtgtatttctaactttgcatattccggcaggtgttttaatatttttgaaaaataatggagacataagagcaccagcaattatagttaattgccaagttccagcaactagccatgatgcaccatatgcagatgcaaagcttaaaggagcgtaaaataatccaaagcctattgtactccaagtgatccattgaataggtttattaattatatcatttaatacaggatttaattgtctatttataatcataataataagcaacagtggtaacataaagatatatcgaagtgatgaactccataaaaagcttccgccagaaatattcatttgttgatttaatataaatgtgaatgcaaagaaaaatgatgctgcgactcctaatagaaatgcttttgccatttgaaagactccttatctaaaatatttgaaattaagttgtgaatctaattagtaagatatgttatattatatacgggaacaatattttgtgcaatatattatttgtatatatgttatgacatacaatatttcgagcaaaggagtagaatatgagaaatttaaattcgattattggaagcaaattaaaggaaatcagaaataagagagaattaagtttggatgaagcagcaaaattgactggagttagtaaagctatgttaggtcaaatagagagaggacaatcaaatccgacagtatcgactttatggaaaatttcaactggattaaaggtatcattttccttttttattgatgaagagcaggatgaattagagatagtggatcaaaataatattgatccgattatagaagacgatgccagaatgaagttatatcctatatttcctttcgatgccaataggggttttgaaatattcactatagaattagaatcagggtgcaatcatgtatctactccacatagtgatggtgttgaagaatatattatagtaactcaaggtgaagtagagatagatattgatgatcaaaagtattcactacaaaaaggtaattctattaaatttgtagccaatataccccataaatatagaaatgtgagtagagaaaaagcaatatttcaaaatataatactttatttcaggtaatggaatatcctattatcaatattttttggatgagaaaaatatacaataggtaagttgcattttaagattgcaaatgctatcttacctatattagagtgaaatgctataatatagaattagataatgataataagaattagatttcattccaaggataaaaatgaagcgaaagaggttgagtgaagtatgggaaaattaagagtaataggcatagggcctggaagcattgagaatatgagcttgagagcattaaaggccattgaagatagtgatgttgttgtaggatataacaaatatattgacatgataaaagacttagttaaagataaagagttatattcgacaggaatgaaaggtgaagaagctagatgcaaggaagctttaaatttatgtaaagataaaaatgttgcattaataagtactggagatgcaggtatttatggaatggctggattgatacttgaacttaaaaaagatgaggacgtggagataattccaggtattactgcaagtagtgcagcaggatctgtagttggggcgcctcttatgcatgataattgcaatattagcttaagtgatctaatgacaccttatgaagatataaagaagagagtaaaacttgcagcagaaggagatttcgtaatatctttatataatcctaaaagtaaaggaagacctgactatttaagagagtgtattgatataataagggagtttagacaggatagcactccagtggcagtagtaagacatgcacttagagaagggcaaagttataaattatttactatcaaagattttgatgaagatatagtagatatgatgtctattgtaatagtaggaaattcaaaaagttattataaagatgaaaaatttataacacctagaggctatgaaaataaaagatagagatagtttgtatttaggtatatgaaagaaaataatgagttaatgatgcactacataaatttgaaataaattagcatggttggctcgttatttttttaatgtgtcttggcaatctggaatggagaaagtatgattggatttattttaggaacttcagaaggaagaaaaattttatcgttaataaataaatatactagtgacattgcggttacaactgctacagcgtatggaggagagttactcaaggaatttaatataaagcagctaaacacaaagcctttgaatgcagaagaaatgctaaaatggatagaggtcaatcaaattgatatgctagttgatgcctctcatccttatgcacaagaagttacaaagactgcattagagtgcgcaaattatcttaagattaagtatataagatatgaaagattaggtgctcttgagcgtattactggagaagatatagtaagagttaaagattatgacgaggctattaaaattataaaaaatatagacggaaatattttaaatactacaggcggaaataatgtttctaagtttgtaaatttagagtttaaccatagagtgatacatagaattttaccatcacctaaagtattggaaaagatagtcgagaagggaattaatattaaagatattatagcacttcaaggtcccatatcttatgaactggagaaagcatttattcgccaatataatattaaggcaattttgactaaagacagtggtaaagaaggtggagttctagaaaagcttaaggcagttcgggaagccaagattaagttaatagtaatagagaaaccaaaatttaattatgaattagtatttaatcatgaagaaaaattagtagagtttctgatgaaagataaaaaaattatatattaatttcaaaattacttaaaagtgaatgctggaatttgtatttgttatgggatgttaatatagctataaaagtgttttcattgaaagaaaatagataaaagggggagattcttacggaaagtgaagagaaactgtcattttacgatgaagaattaaatgaaattggtatagcttctcgttcagaaatacatgcaaatggacttctacataaggttgttcattgttggatagtagatgagtctagcaatgaaaaatggatatatcttcaacagagatcatataagaaaaaagattttccaggattatatgatatatcagcagcaggacatgttgatattggagaggaaatagaaaatgcattaaaacgtgaagttaaggaagaaataggaatagaaattaattctaggaacttaagatttgttggaagtataagagaaaaacttaatctaaatagcttcttaaataatgaaatatgtgaagtatatttatataatataaaagatcctaaatttaatattggatctgaagtggagaagattgtaaagctatcagttagtgaatttaagaagctggtattaggtcgctatgactatattatggctttttcaattgatgaaaagttaaaatttaatataagagctcatgaattttgtgtacacaagaaagaatatctaaaatcaataatagattttattggaaaatgattattgattaaattatctttttggaatataatcaaagaaaataaataattcatactgaagggagttaaagtaatgagcgttaaagaaaaagttttagaagttatgagagaggctggaaagccagttagcgcaggtgaggttgaaaagttatctggtttagatcgtaaagaaattgataatgcattcaaggaattaaagaaagaaagcgctattatatcgccagttcgctgcaaatgggagccagcaaactaatatacattataactaaattgaggagtactcttgggataatgatgatatcacaaaaagaggctctttatttttttgcaaatatatattgcaaaaataattctttatcataattctgaaaatattgaaagaattttagcagtaattgcgaattgtgaaatgtgcattatgaattatgaattgcaacatatatatatgatgtttatgttaaagaagctagctgttaattcattaataatttttttagtaattacacttaaaaatatatttaaaataataagtgattgtcgaaatattatttaaaaagtaatagaagtttaataaaaatagttatctgaaatttatatttacattatataatttaaatatataacttatagataatataatttatcattaaatattgggttactgaaattctgaatgtaattttattattttagcataacattttatagcttattaagagaagtttttttggctatgattgttcatttataattatatattttttatgtgggatgagagggagaattattatgaacacgagaaaaagaagatttaaaagagttgtactaaatattatagcctttggtattattacctttgctatttttggagtttatagcggctatatggcaaaatataatagtataaacctacaggatttaaacacaaaaatgtatatacaggatgcagataatgcaagcaaaggtaaacttcaagtaaattggaagttcatggcggctattgatggtgttagatacaaaaatgatttttctaaggcaacggatagtagcataaatcaattagctaatatgttcatagataacaatagtagtacaagcattaaaattaaagatagtcaatataagctcgttgatttggatacagtgttagataagttatcttttgataaagaacaaaaaggaaaagtatataagtatatagatgatttaaaatatattggatctcaaaaaaataatttaaaagatgaatctaagcaaggatttattaatgatttatatccagaagcaattgagatatatgataagtatggtattcttccttctataactatttcgcaggcaatattagaaagtggctggggaaaatcagatttaagtaccaaagccaataatctatttggaataaaagcagattcaggatggacagggaaaaaaattaaaatgagtacttcagagtattataaacaaaaaatcgaggattactttcgggtatatagtagtaaagaagattccatgaaagattatggggaatttctcagcaataataaaagatataaacaaagtggagttttccaggcggctgattatctagatcaggctaatgctatagaaaaggctggatatagtacagttgaaaatgacaagggagaagaaatttattcgaaacttctgataggagttattcaagaacaaaatcttcagcttttagatttcgaatgtgaaatgaactattttaaagataaaaaataaattatacgcattgtttatgaatttatgttatattaaaacaaaaaataatagagtatataattgggggaaatgaaatgaacattaattctaaagaattaagagatattattaatagcataagagaagcagatgcttatgtaatcgctgaagcagacagaagaatggtatcacttgcaaagccgctgaagagtttaggaaagttagaagaaattgctataaaacttgcgggcattacaggcaaagtgaaaaataatataacaaaaaaaatggttataataatgtcttcggataatggtgtggttgaagaaggagtggcttcagcacctcaatcggtaactttggcccaaacaattaacttcacaaaaggattaacaggtgtagcagttcttgcaaaagaaaatgatactgagcttatggtgatagatgttggcattaactgtgattttagctatcctggtgtaattaataaaaagataagaaaaggaactaataatattgcaaaaggtcctgcaatgacacgtgaagaggcagaaaaagcaattttaattggaatagagtctgttaaaaatgcgaaagaactaggctatgaaattcttggtgttggagagatggggattggcaatacttctactagcagtgccgtgttgtcggcattaacagacgtaagagtggaaacagttgtaggaagaggagcaggaatcacagacgaagcatttgagaaaaagaaggaagttattaagaaagcaataaaggtaaacaatccagcaaaagatgatccaatagatgtagtttcgaaagttggaggttttgacttagcagctatggcaggagtatttttaggctctgcttattataaagttccagttgttattgatggatttatatcagcagttgctgcacttatagcctttaaattaaattcaaaaactagagattatatgtttacttcacatgattcaaaggagttgggatttaaagttgcaatgaaagagttaagcttaagtccaatattagacttagatatgggacttggagaaggaagcggatgcccattagcattttcaataatgaaatctgcgtgtgcggttatgaataacatggcaacttttgaagaagcagaaatcaacgacagttatttagatgaacttaaggctatgaataaatgataaatatttaaatgattgcagggtattaaattaactatttataatttaataaggcacatgaaagtaaataataagtaaaaaactactaaggaatatttttttatgtagaaaagttccgtattgcagcatagatgctcttttcttaagtgtatagctgctttgtataaggcgtatatttttagtcgggcgaggaagtaaaagatcatcatagtggggttaatatggaatttaaagaatatgttataataactgtatactctataaaaatatgagtatgtaaagcagttaaaactgatgatattatgttttaataatttgataataatatatttgttttgacaaacggttatagagtaatgattaatcagcatttttgaatataaaattacttatttttttatgaataagaaaggagagtatttatggaattaggacttattcatatttattgtggagatggaaagggcaagacaacagcggctatgggcctgggaatgagagctgttgggcgtcagaagaaagttttgttaacacaatttttaaaggataatgagacgggtgaattaaattctattgataagctaggaaatgactttgaagtttttaaaggtgctccagtaaagaaattttttaaatttatgagtgaagaagagcagatagagactaaaagagagcatgaggaaagattttctaaggttactaaaaaggctgtagaagaaaattttgatttattgatattagatgaagtgattgcatctactaatttagatttaatttctttaagtaaagtaatagattttttagaaaagaaaccaaagggattagaagttgttctaactggtaggaatcctaatgaaaagttagttgaacttgcagattatgtttcagaaattaaagctgtaaaacatccatatgagaaaggaataggctcaaggataggtatagagaaataatttatttttaatagcattttgggcttaaattagagtatatgaattatttgataattggaggttctaagagtggtaaatcagaagttggagaaagaatagctctaaccttaaatagaaatgaagttacatatattgccactatgaatccatatgatagagaagatgaagagagaatagagaaacacaaaaaaagcagagaaggatttaattttaagacactagaagttcctagggatttggatagtgtgattaatatgatcaattgcaaggatactgtacttatagatagtataacttctcttttgactaatgagatgtttgttgaaaattatcttataaaaaatccttctcataagatattaactgatataaaccatgttatgaatagtgcaaagaacgttgttattgtgagtgattacatatttaatgatgctatacaatatgatgaaataactgaaaattttaagaaggaactagctattataaatagaggattagcaaattattgtgagaatgttatagaatgtagctttggattaatcaagtatattaaacataaggagaaagtaactttatgaagaaattatacaaaggatttattatggcattaagcatgtttacgatacttccaactccatatgttgaatgggacgatgatggagtaaaaaatatgatgaaattttacccactgattggattaataattggagtcttgtggagtataatatattatttagcaagtatattaaatgcctcaataattttaaagagttcaataattaccatagtaccatttataataacaggaatgcttcatttagatggttttatggacgtttgcgatgcaattctttcaaggagaagtaaggaagaaaaactcagaatacttaaagattcagctacaggagcgttcgcagtaatacctctagtgattttgttctttttacaatttgggggggtatattctattttagaaaagaatagttctctttatacattgattttgattccaataataagcagaagtgttgtagcgtattatcttttaagcagagcaactataaaagaaagtactttagggacttattttaaaaaagggaccaatgtttatgataagcttattatgataataacattgataataacattaataatatcagtaattttattaaatatttatggaataatattagttttattaatgagtttaggaattaaattgtcagtagaaaaatgcagaaaagaatttggtggaatatctggagatgttgctggatttgctttggttataggtgaagtggttggaatattaatactaggaataattccgtaaggtgaagggggacagttatgaaattaatttttggtggagcctataatggaaaattagattatgtaaaagaaaaatataaagtaagtcatgaacagatatttttctgtagagatgaaaatatagaatataataaggaaatcatatgtggattacatatttttgttaaagcgtgtatttctaataagcttaacccaatagaagtcttaaaagataaaatggatttgttagaaaataaaataataatatgtgatgaaataaattctggaattgttccaatcgaaaaatttgatagaatatggagagaagaaactgggcgcttacttcagtttctagcaaagcattcttcccatgtatatagaatattttttggaattgaagaggaattgaaaaataatacaatttaaagaaagaggtaaattagttatagatttaattgaaaaaactatagcgattaaggtatgaaagaaattaagttatatttggtcaggcatggaaaaacttattgcaatgaaagacaattatattgtggtaaaagtgatgttgaattaagtgaaagcgggaaagagcaattaatggaaatttctagaagggttaaatatacaaagtgtgatttttactttacaagtggggcaaagagagcaaatcaaacattagaaattatttgtccgcagaataagtataaagttttaaacaagttttttgagtatgattttggtgattttgaattaagatcatatgaagaactaaaactgctaaaagagtatataacttggatagaagacgaagaaggaaatgtaaaatgtccaagcggagagagcagagcagaatttagaaaaagagttaatgatggatttgtggagcttataaattatatcattaaagaaaatatagatactgcttttggagtgattcatggaggaagtataggtatgctattagaaatgttttatgatagtaagaaaaaattctatgagtggcagcctagcaatggagaagggtacgaacttacaataaaaataagagaagatgaacaatttgaaatagaaaatgtatctcaaatacagtaagaaaatatgattagaattatttttgagatgcgaaagaaaataacgaggagaactatatgattgaacttagtataggatttgttttggatttattaattggggatcctaataatccgtttcatccagttagaggaattggatatgtggctaaaaaacttgaagcaatgtttagaagaatccttagaaagcatttaaaagcagcaggtctcattgtatggattcttactgtgtcaataatatttgcaattgcattcgcaattgttaacttatcgagagaattcaatatttacttcggaattattttagaggggattttgatatatttttgtatatcatcgaaagcattagttgttgaaggatataaagtagttaagtttttattaataaatgatttagatggtgcaagaaagcagctatcatttatagtggggagagacactgcgagtttgagcaaagaaggaataataagagcagttgttgaaactatagcagaaaatatggctgatggggttatagctccgttattttatgctatgatttttggagcgcctcttgcattcgcatataaagcggtgaatacattagattcgatgtttggatataagaacgatgaatacatagagtttggatatttttcggcgaaattggatgatgtttttaattttattccagccaggataacgggcatgttgataatattagcttctgcatttctaggatatgattataaaaatagctttaagatatatagaagagatagatataatcatacaagccctaatagtgcacatccagaagcagctatagctggtgcattaggggtacagcttggaggggcaaattattattttggaaaacttgtaagtaagcctacaataggagataaaattaaagaaattgatattaatgatgttaagaagactgctaaggttctttatttatcattttttataggatttgtattcactttaatatttagaaagctaatgataacaatgttttaaatgtcagaaatttgagtggttaacgaatattataatatagagatgtgagagttaatattaaattaaaattaatgtgtatattgaaataataaatttatagttaagcgtataacaagctaaaaataaattaagattgaagtggagaaatttaattgaaacatatatgcactatgcatagggaggaaagtcatggcaagctttggacatggtggaaatgctaaagaaataagtagagaaaacaaaataaattacaaagacataattgatttttcagctaatattaatccattgggaatgtcaagtagtgtaaaagatgcgattattgaaggtatagatgaaattgagaaatatcctgatataacttattttgaactcaaggattcaatagaaaagtttgaaaatgttagcaaagaaaatttgattttaggtaatggagcagcggaagttttatttaatgcagtaagaggagtgaatccaaagaattcattaattttggctccaactttttcagagtatgaagaggcagcaaaggcaataaatagtaatattatttattataatttgaaagaggaaaatgattttaatataagagaagatattctacatgatataaatgaaaacttagatttagtatttatatgtaatcccaataatccaacaggtgttataactgaaatagatttattaaaaagaattttgaacaaagcagagagaaataatgttagggtaataatagacgaatcgtttttggattttagagaagaaagtttttcgatgattccatatatagatgaatataaaaatttaattataataaaatctttgaccaaattttttgcacttccaggtataagaattggttatgctatttgcagcgatttaacactaaaagagaagatagaaactacatctcctgcttggaatataaatatcttggcagaaatagcaacaaaagcagcacttaatgaaaagaattatataaagaaatctatagaatttatagaccatgaaaaaaaatacctttataatgaaataagagaaatagatgggattaaagtctttgaaccaagtgtgaattttattttattaaaaactctgatcaaaatagatttgaaaaaagaactattaaagaataatatattaattagaagttgtagcaattatgtgggattagataatagatattataggattgctgtacgaagtcatgaagagaattacaaactgataaaaataatgaaaaatatatttgaactgcacagaaatgaacaataatttaagttatgtataggttaattttattgttggaatcagatgaaatattaagctttgataatgagaggagcaggatatgaatagaaaatttattgtttcaataatgagcgtgcttgtaggaatgagtgtaggaatctctattaaagttaatggagaaattagcaatggatgggtcaataacaataatggttggagttattataaaaatggcagtgtaaaaactggatgggtaaatgataatgggaatttttattaccttaaagacgatggaaatatggctataggatggattaatgttaataacaagtggtattatatgagtgaatctggagccatgaaaacaggttgggttcagtataaaggagcttggtattatttaagccaaaatggagaaatggtttccaatgatactgttgatggatactatttaggagtagatggatcttgggttgaaaaaaactcaactaatgatgcgacggaaattaatgatgaatttaaaaataatataactatgaaaacagaaaagactgaatatggtctgaatactaaagaaattactgtgtatattacaaacaatggaaaacaatcagcttattatggagtagaatatgcagttgaaaaatttatagataataaatggagtaaagtcccttttaaagatgaaccaatgtttatagaaatcgcttataatttagagcctggaaaaacaagtagtcaagttatttctctagaaaattttgagaatttaactgctgggaaatatagaatagtaaagtttagcggaaaatgtgctgctgaatttgaattaaagtaaaaacaaataagaggggtagtatggataaagaaaaagttgtagtttcattcagcgggggaaaagattgtactttagccttgtataggatgattaaaagtggttataaaataataggattattagttacgtttgaaagcaaaaaggattcgtattttcataaaataccaaggaatgtttttcaggatatttctaaagaattgggaattccacttattgaaatagattgtagcaataagaataattatgaagaagaatttgagatggcattaaaagtttcaaaagataaaggtgctgaaatttgtgtgtttggagatatagatatagaagcacatagaggttggtgtttagataggtgcaaggcagcagaaattaaaggagtatttcctttatggcaagaaaatagggaaaagcttactaatgaatttatagactgtggttttaaggctataattaaaaaggtaaatctaaaggcgctaggaatagagttcttaggaaaagaattaacaaaagatgttgttaatgaaataaaaaacttaggatgtgatccttgtggagaaaatggagaatatcatacattagtttttgatggtcctatatttaagaattcaatcaaatttaataagagtggtacagagattacagagaattatggatatttaacagtaaacggattattagattaaagatataaatttagaaaaataattcaaaatttgaattcaaatgttggaaatcagggattaaaaataaatgttaagtattggaactcgaatttgaggggagtaaagaaatggataaaaaaagtataatgtttttaggtacagcgtcttctgttggtaaaagtactttagtaacagccctatgtagatatttaaaaaatcaagggttaaatgtagctccttttaaggccttaaatatttcattaaattcttatgtaacaaaagatggattagaaatgggacgagcacaagtagttcaagcagaggcttgcaaattagaggcagatgcattgatgaatccggttttgttaaaaccaagtggtgaatatacacaagtaatagcagatggaaaagttttttgtaatattgagccttataaatacaaggaacttaatgaaactttaaaggtcagagttaagaaagcttatgataagctaagcaaaaagcacgatgtaattgtactggagggatctgggagttgtgccgaaataaatttgaaagatagcgatatatctaatatggctatggcagaaattgctgatgcacctgtaattttagtatccgatattgatagaggtggagtttttgcatctatagttggtacaattcaattattaccagaatcagagcgtgaaagaataaaaggggtaataattaataagtttagaggtaatatagaactatttaaacctgcaataaaacagttagaggatattataaatattccagtccttggagttatgccatatgaaaaatttgatattgatgatgaagatagtgtaactgaaagaattaggaacaaagaagaagttggaactttagacattgctattatcaggctttctcatatgtcaaactttactgattttagtattttagatagaattccagatgtgactatacgatatgtggataaacctagtgaattaaaaaatccaaatttaattataatacctggaacaaagaatacaattgaagatttaagaagtatgaaagaaaataaattatttgataaaataaaagaattaaaagagagtggtacacccattttaggaatttgtggagggtatcaaatgcttggaacgttgatactcgataaattaggcgttgagggtaatatatctcaagaggatggtttcggatttttggatataaagacacgatttaatgagacgaaagttacaaagcagactaagggaaatattttatgtgatctaaaatcaattaagtctatagaaggtagcactataagtggctatgaaattcataatggaataagcaagattggtaagaaagcaataccttttattaaggatttagatggtgatatcgtaggtgtatgcgacaaagaaagaattgttgcaggaacttatcttcatggtatgtttgattcagaagaatttataagttcatttgttaaatctcttaaagagaacaacgatattgttgttacagaagatataattatagaaaaagtaaatgaatataaagataatgaatatgatagattatctaaactttttgaagaaaatatagatatatatcagttgagaaaaataatggaactttaggaagaaggggatagagatgttaacggctactgaagagagattattagaatatatagaagaacgcgcaagagcaaatgttaaaggtaaaactttctataagatgacggatatattagagcaggcgttttggatatcagaagaaaaggcatatgaggttttgaaaaatataatagcgagaaaaaatataggaaattccaaagatgctattatagatgaatatattgatatgcttaaaaagggatatggatcaatacaagaacaggtagatttatttggtggggataagtatacgagtgttatgtatgcggctgaaagaaggttaaagcagtatgaaggcggtacattctttgatcttcttagagaagtttataaagtcccagacgaagaaattatggaggtaacagaaaagtatttaaagtttttaaactctccaatattttcatataggttagaaaaggagacttttcataagtttctacaatcagacctagaggaattagataagcagttcaatagatttgtaaatttatagtattaagttaaagataattattaagcagagcatgctgtagttaaaagataataattatgattctaagtgttagaagtagatttagataaatagagaatattattctgaatattcaagaaaataatagaaaagttttatacccagtttttatagtattcatgtaataatatactatatgaactgggtgtaaaattatcattttaatactctaagtattgctaataatataagtagagctcctgataaccaagataattcaaggtgtactttttgagcaaattttcgtccaataactaccccaagagatactagagaaactcctatgataaagcataatactaaaacttccgtatagttaatgttacataggctagacccaattcctactgcaagactatctaatgataatgctaaacctagataaaatgattctttaatatttaggcattttgagttatcaaagtcagcttttatttcatctgcataaacttgcaagacaaattgaaaatcaaagatcttaaatgttaagggactatcggattttgaacattttgaaatatatgatttaaagatatattcaaataatctatatattccaagtaacatcaaaagtacaaatcctaaaattgcgggaaggttacttgggagtatgcttttaactattgagccaataagtaaagaacaagcaagtgtaatggtgcatactaaatttattactactgcgcatatgggtggaatacgaattttagaagtaccataagcaatacttgcaacaaaagaatctatgcataacgaagatactaataataaagactcaagcataactattacctcataagttttagatacaattcatgatatgaaagaaaactactattagttacaaattttgaggttttatattattttggaatagatttattaataataattgaaattcctatagaatcactgtaaactataagaaataataacaatgaatatataatatattgttgtaataacatattcatatatatattgcatttggtgatttaaatatttataatgtagcaatttaatcgcaacatatatatctaaaaaaataccaataaatatgccgaaaattatattatataaatggaggaataaaatgtataaattacttgcactagatatggatggaactttacttacaactgataagaaggtttcaaaaaatactgaggcggctataaaagctgcagaagaaaagggtgttaagatagtattagcatcaggaagaccattagatgggttaaatagatatttagaagagcttgatttaaaaaaaggtgaggactatgtacttagctttaatggaggattagttcaaaatactagaggaaaaattgtttcaaaggtatgtttaaaagggagcgatttaaaatatatatatgaaataagcaaaagactcaatgtcaatgtacatgctttttctgcaaaggatggattaatagcgcctaaaactagtcaatatacagagtatgaagctgcaatgaatggaattgatattactattaaggatttcaatgaagttgatgacaatgaagatattataaaagtcatgatgatagatccacaagaaatattagatccagccataaaggaattacctagtgaaatttatgagaaatatagtgtatttaaaagtgcaccttactttttagaatttactcataaggaagtagataaaggacttggattaaaaaaacttggtgaatatcttgggataaaacaagaagaaataattgcatgtggagatgctggtaatgacttatcaatggtaaagtatgctggtcttggtgtagctatgggaaatgctactgaagaaattaaacaagctgcaaattttattactgattcaaatgatgaagatggaatagtaaaagtaataaaaaaatttattttaagtgaatctaaataggaatttataggaaattgttttatttctattgcctaaactacattttgataggcattataaaacaatttctttttattctttgggaactgcctatcaaggcaaagccttcaaagagtataatgaaagtagttttattttcgcaggaaatttataatatgttgaaatatatggacattgtgtggcttatgagtacaattaatataatagcctacgcaagtgatgctaaaaagaataaatacaataaaaaaataaatagatttaattaatgaaatttgatgtttaaggtaatataatatatttatgcacatatacggtaggattaatttacttaataattaaaaaattaaattaattgtttggttattgttaggtgttacataaagaaaggctatttacatatggtctatatttaggggtatggtataaataataatgatttatttagggggaatataagctttgagattagtcccaattgaaaacgtaaagccaaacacagtacttggaaaatcgctgtatgatattaatggtagaattctacttagagctggagtagttttaagagaaaatacaattgcaaaaataaaggaaataaatattttatcaatatatatagttgataaatatagtaatgaagaaattgaagatattattaagccagaacttagacaaaaagcaattataacaataaaagaagccttttctaacataggacgacttaataataattcagtaaggaataaagaaagtgattatacttggcaagagcagagttatttttataatattggaaagatggcagtagatttaattgaggatatcgtaaatcgaagggatgtaatgcttgcattagtagatatacgaagtatgaataattatatgtattctcattctgtaaatgttgcagtaatatcacttactataggaattgcgcttcaactatcaaaaaagaaattagaagctctatgtataggagcattgatacatgacattggaaaatcattagtacctagagagatatttgataaacagggaagtttaagtgaagaagaaaaagaaatattaaaacaacatccaagacttggatataagtatttatcaactacttataatattaatagtctaagtaaattaatagtccttcaacatcatgaaagaccagatggaaatggatatccagatggattaactaaggataatattattgaactaagtaatattgtaagtattgccaatgtatatgataatttatcaacagacttgccgaataaaagagcaatgtttccaagtgatgtactggaatatttaatgtcgaatgcaggaacaatgtttgattataatatagttaatatattttgtagaatagtaattccatatccaaaaggaactattgtagaattaagcacagaagaagttgctgtggttgaagaaacaataccaggattcccgctcagaccaactgtaagagtaatagaaagtcctagggtaagtagaattagtatgaaaattgatcttataaaagaaatttcaatagttattaccggggtgaaatatgaaattgattagtataagcatataaaggcaatcttaatctaaagattgcctttataactattcaaaaatgtcaataaacttaaaattgataacatcaaataaacctttatctgtaatctttaaatctggtattactggtaatgataaaaacgataatgttaaaaatggattgaaatcaatttgtggtgctataattttgatagctgaatggagattttttaaatcaaactcaatttcaccatatgttctatttgtcataagcccaccaatttcgagtttaatatgagcaagaatatttttatctttaaccacaattataccgccgcccattcgctccaattctttagcagcaaatagcatatctttatcatttgtcccagcgattattaaattatgggaatcgtgagcaatggtggttccaatcgcacctgctgaaatttccaagccttttaagattccaagtcctaaattgccagaagccttatgtctttcaataactgcgatttttaataagtcttcttcagttgaggaagtgaaaaatttataatcactatcttttattgaattaatatctgaaatattgagccttaaatgaatgctttctaatttgtttggaattatttctattgcattcaatatctttacgtctttatttggtatattaattttgaaactatcttcacttagtggtggaagatttatagaattataaaaagcattgttatttgcgttttttactaaatctgtatcgaaattaacaagttcattattgtttacaactaatttaccttctttataaacttgagatattttaaatctttctaagtcatctaataatataaaatctgcaatgtatccaggggcaattgctcctttgttatttagtttatataagagagatggatttagtgttgccatttgaatagctgtttctggatttaaattagagttgtttatagtataaataattgagctattaattgatccattagcagcaatatcgtcaatatgcttatcatcagtgcagaagcaaaatctattactattagattcattgactgcaggtaataattcttttaagtttttagcaacggtaccttctctaattagaatatacataccacgtcggatcttatcaagagcttcttcagcattattacattcgtgatcagttaaaatattggcggccctataggtgtttgtcatcatagatgtgaagccagctccatgaccatcaataactttattattagtaattgaatcgcatatcttatcaattatcttatcatcacattctgagacagaaggataatccataacttcagctaaacctaaaactttatcatttttataaaaatcttttaagtccttagagagcaaagttgcaccagagctttcaaagctagtaccaggaacacatgatggaagcataaaatatatatcaaatgggatgttttgtgaagaattaagcatgaaatttataccatcagctcccataacatttgagatttcatgaggatctgcaataacagatgtgattccgtttaataatgccagcttgctgtattcagtaggtgtgaccaaactggattctatatggcaatgggaatcaataagtccaggacaaatatatttgttagttccatctacaatttcatacccatcatagtcaccaataccaacaatatatccatctttaataccaatagtatctacgaacctattcttattaaaaacatcaattatggtaacatttttaattacgagatcacattttacacttctattagaagctttaatatgatttattaatgtatctttattcaaataaaagtcctccttattacgaatttttattagttatattcactgtatctaaaaaatatattgccttattataattgaaatttgtgaatattgtcaaaagtaaaaatgtttacaaataaaaaaaaatatattcttacttttgataacgtttagacataaaggctttatacataatatggagataaggaagttaggtgcatattataagcttaattataatatgcacctaacttttagttatatgattaattatttaactaaataaattctatacatgttggagttgggatgttttcagattttataaaagttaattctcctgttattgaattaatagaaaatatagatatattatcagaattttcattagcacaaagtagaaatttaccagatggatccaattgaaaatctctaggagaatcaccattacaagaaatagtgtcgatatactttagctttccattatctgaatttatatggaataaacttaaagaattatttcctctatccgaagtatagagaaatttattattcttgtgtatacgaattgcggaaccagattttgtccctttgtagtcctttgataatgaacttaaagtttgaatattttcaaaaacaatatttgattttgctttataatcaaaaacaaatatttcagaagttaattcacttaaaacgtagtaatagtgttttccattagcataagtaatatgtcttggccctgtgccggcagggaatgtatagcttaaattttcattttgatatagttttccatcttttattgaagaaactatcattttatcaatccctaaatcaatagataaaatatatttgtcatcatcagtaaacattgagcaatgaatatgaggtttttcttgtctcaattgatttacactagagccactatgacttccaagcataggagaatttaaaattaagccatctaaagttttgtagacaaacatcttgttttcatgatagtttgaagaaattaaaatctcatgactgttatttagacttacatgacaaggtggtttttcttctgaaagattagagtttattaagtgtagtttattatcttctttccaatatttaaatgaagataccccagctttttcattgattttacatgttgaataaagaatgtgtcgttctctatctagagttagatatgtaggattctctatattgtaagctaaattgatattttcaatattgcctgaaattgtatcaaaattaattctatagattcctttactttcatttttggtataagttccaataaatccaactgaaatattttcttttagtaccattatatatgcccccttttattgtatatctattagtatagcataaatggaagtaaaagatatttatgaaattttgcagagatctattgattttaatcatttaattatagtagtggaaagaataaaaaaaattaataattgtgtataattattaatgtcaaaatacaattaaacaacagtaaatttttgtaaatggttaattgtaaacatctataaactgtaaatgaagtaattctatgatttattaacagtgattaccacaaaattagttttatgcaagtaaatagcaaaaaaattctttatcataattttaaaaatattttaagaattttagccgcattttgaattgtgaaatgtgcattgtgaattgaaacctatataaattggtttaaagaatttatgccatatatttatagtttaacttgtgaaagtcatagcaaaataaatgtatttttaagcttacataattttattattatatttatttttataatgttgataagaagtggaattttgatataataatatttatatacaaaaataattaaataataatctaaaataagcaataatcacattggggggaacaaagatgccaataaaaattcctatagaattgcctgcatttcaggttttatctgatgaaaacatattcgtaatgaataatgagagggctaatactcaagatatcagaccgctaaaaatagcaattcttaatttaatgccaaaaaaaatagtaacagaaaatcaattattaagatatttatctaacacgccactacaagtagaggtaagtctaatacagactaagagttatacttcacacaatacaccaccggagcatctaaataaattttatagctattttgatgatataaagcaagaaaaatttgatggacttataataactggggctccagttgaacaaatggcttttgaagaggttacatactggaaagagcttactgaaataatggaatggagcaagactcatgtattttcaacattctatatttgttggggagcacaggcaggtttatattatcactatgatatacctaaatatgatttagatgaaaaaatgtttggtgtgttctcacattgggttaatgatgagaaagctgatttgacaagaggattagatgatgtgttttatgcaccacactctagacacactgaagtcaaacgtgaagatatagagaaagtttcaaatcttgaaattttatccgaatctgaggaagctggagtattcatagttgcaacaaaagataggagaaatgtgtttgtaactggacatatggaatatgatagaaatacattgatggatgaatatataagagataaagaaaaaggcgatgaaatagctttacctaaaaattattttagaaatgatgacataaatcaaaaaccgttgtacacatggagaggtcctgctagcatagtttttggaaactggctaaattattgtgtataccaaaatacaccttttgatcttaatactctttagaaattttatgaataaatcataagtgcttttaaagcacttatgattttgttcttaaattttgtgaatcttatataaggagatattgatgaaggaaaagaattttcatttaatattattaataagtatatttgcaattttagttgcgtcgggaataaatcctcatgatagatttacatgggtattagaggttattccggcagtgataggcgttatggtcttaataactacttataataaattcgtatttactaacttaacgtatattcttatttggtttcatgcagttatattaatagtgggtggtcattatacatatgcagaaatgcctttatttaattggctaagagatacttttgacttgagtagaaattactatgataggcttgggcattttgcacaaggatttgtaccagcaataattattagagaaattttcataagaaacaaaattgttaaaaatatagcatggacaaattttattacaatatcaatttgtcttgctattagtgcttcttatgaaataatagaatttattgtagcattaattactggcgaaagtgcaactgcttttttaggaactcaaggagatatttgggatactcagtgggatatgatctttgcacttttaggctcaatggtttcagtattaacggtaggaaaatatcatgagaatttattaaagacaaagcagtgatactttgtccaataaaatttgaatattagcatgctattttaataatttaaatatagtatagctatgaaaatttgcataagaagtatgaatggaactccaattgtaaacttcttatgctttgttttgtgcctaaaactagacattccaataagcattccaatagatcctccaaaaatagagataccaatgagtgttttttcaggtattctccattctttatgaatagctctttgtttatctataaacataataagaaatcctagaaggttaataatcaataaatatgtaaatacgacttttaacataaatttcactccaatatatcattaaatataaattaatattaatgataacataattcatactgaagcacaaaatatagagatatgaagtaaaagaagttagatttacgaaattttattagtattgcttatttttgaatctataacattagccgcctaaagttacatcttgctcattgtaccaagataaagcattataaaagtcttcctttttaaaatcaggccagtaattatctaaaatataaaaatctgagtaaactgattgaactggcagcaagccacttaatcttcttcgcccaccccatctaattataagatctattctagaaatatcctttgattgtaaatgtggttgaatatgtttttttgatatatctgcattttttagtagatttaaatcccattcccaaccgtaatttattaaaaagtttgcctttattccacctgaaccaaacttttttcttttagtgaagggcaataattcttttggaaagcaactagactcagtattacctaagactaatatttcgcaatcttcttttgttaaaagcataacagaatcaatgcaagctttagtaaatgctattttttgatcgctaggacgtttggtattatcaattgtgaatccataaaaggttacttcctgaatattttctttttggcataatttaaagacctcaagtcctggatttattccgtgatcatatcccttatctttgcctaatgagttagataaagcccaacgtctatttccatcaggaatgatgcctatgtgttttgggattcgcataattttttcacctctcaaatttgatattgcttttaagagtataacccaattaatccaaaaaaatacacacctataaaaaaagcgcgaagcgcaattaggatcttgaatgaaaaaagcgcgaagcgcaaccaagaacttaaatgaaaaaagcgcgcacatatgaaaagagtgcggagcacaattaggaacttgctaagcgcaaccaagatcttagatgaaaagagtgcgaagcacaattcggaacttattaagcgaagctaagaaagtaggtgaaaaagtactcatttataaaaaaaaggaaaagcatatttagaaacataggttttatataaacttaaaaaataaaaaccctaagcacaagtttaggggatcctatgcttagggcgagtcattaatatataaacgacttctattaattaataaggggtaaataattaactactttacgatatcagtataatccttaaatgtgtcaaaaatatgtcagaaataaaaaatacatttaattaatataataatatttataaagagctgtatcactatgaagaataggttattaagttatatgagctgattataaatatttaataattaattataaattaaatgttttttgagcgaaaatagtatatactaaaatattagcagaacaagatgtttatctaaggttagaaattttttcgattaacgttgttttgatagattctaaggaatattctttgattagaattttattagatagagagcaagaaaaaattttttcattatctatattattcagagttaatctataattcttataagaattgcttggaaaaaacaatctttatctgataaacttaagtgagagtccaaaagtgaagatccaaattttacatttggctactgaactttctccttgcgagaatgtatcatttggtaactctaacttactcagcgaacgaatgtgagtcgagtttcagctaatgagtccaaaagtgaagatccaaattttatatttggttactgcattttctccttgtgagaatgtagtgtttggaaataaatagaaaatgcaaataaaaaagtatgtgaggtgtcaatacgtgataggcttaataggcataagaaaaaatactccattggaaattagagaaaaatttatagttaagtctaaaaaatataacgagtattttggagaattattaaaggagctaaatgaagtagttattttagctacatgtaatagaacagaaatttattttaatgcttctttaaatgaagaagaattattaaaaaagatttttgatatttttaattgggattatgaatataaaaaatatgtttttataactaataataaggatgcttataggcatttgtttgaagtttgctccggatttcattcgaaaatattaggagaagatcaaattctggggcaagttaaggatgcttatgaagaagctttagaatttaaagctgtttcattggaattgcatagattatttcaggaagctattacttgtggaaagcggttcagaaaagaagctaagttatttgaaataccagtatcatcttcttcgatagtggttagcgaagctattaagcgtgaatgtactaaatttatggttttaggttatggggaagttggacagcttgtaatgaaatatttgctttcacataaaatccaaactgtctacttggttgttagaaatcctaaaataaaagatgaaatacaggatgaacgagtaaaagtaattacttttgaagaaaagaataaatatattaatagtatagaatgtataataagctgtacttcagcaccacatccagttgtaaaaacagaagatattagtgaaagtggaagtaggttagtaatatatgatttatcagttccgagagatgtggaaaaagaggtggcgttattatctaggactgaagtttacaatattgatacaataagtcgtatagatgatgaaaataaaaaattaagaaaagacaagatggaagacaataggcatataatgaataaatacctgaaggaatatgatgaatggttaaaattaagaagtatttctcatgtaatcaaaaacttaaaaactgttggaaatgatgtttacgagaaaagagttcaaactttttcacataaaagcaaagataaaaatgatattgctttagcacataaattaattaaaagtacatctgatttttacataaatagggcaattgaagttattaaagaagagactctaaagggatgtggtgaagaatggatagggataatagagaaaatatttatgacgaaggaatagagtattcttatatttcattaatttctaaaaaactaagagttggaatagttggcggaggtaaagcgggaacaataaaagcaagacattttgtgaaaaataaatgctgtgttgaggtaatctctaaaacttttgatggagaattaatagaactttccaaagaattttcagaaatacttacacttaaaaatgaagatttaagctatgaatttttaagtgataagcaccttataattattgcattagatgatgaaaatttaaaaaacatagtgaagaaatactgtgaagagaattataagatatatatagattcatctgattttataagtggaatgggagttgttccgattcaaagaagtacagaaaatgtagtatttgctttaaacactaattatggaaatccaaaaggggcagttttactttctaacaaagtagaaaatactataaaagaatatgatgaatttattagatatataggattaatacgaaataaagcaaagtcatttccagaacttaaaatacagataacttcgtttattggaaatgatgaatttaaaaaatcttttgataagggtgaagctgaaaaagcattaagaagcagattttcgaaggaaattgtagattatttaatcaatttttaaatggatttgtagataaatgaattttggaggtagaattaaattaatgaataaattgactatagcaacaagaaaaagtaaattagcacagacacaaacagaaataataatgaaaagtttaaaggataaatttaatatagatagtgaaaaaatgcttattgttactgaaggagatagaaaattagatgtttctttggcaaagataggcggaaagggattattcgtaaaagatatagaaattgcacttttagaaaaaagagctgatggcgcagttcatagtatgaaggatgtaccttatgagctgagtcatgaatttgaaatagcggctataacggaaagagaagatataagggatgtattaatttctaaagataatataccatttaaagagcttagaaaaggtgcaataatcggaactagcagtataagaagagcttgtcagctaaagcttatgagaaatgatttggatatagtcccaattagaggaaatgttcaaactagattagagaaaatgaaagaacagaatttagatggaatcatactagcttcggcaggattaaaaagattaaatgaagaagatataatcactgagtattttgatcctaaagtatttataccagcagtggctcaaggagctttgggaatagaatgtctaaaaactagcagtgctaaaaaatattttgaaaaaatggaagattcaaatgctaagttaacagttgaggctgaacgaagctttatgagaatgctaaatggtgattgtcacagccttattggagcttattctgaaattcaaggtaatgatttatatatgattggtatatatgacataggcggaagaatagttaaaaaagatattttaggagataaaaacgatcatattgaattaggaagaaaattggcaaataagatattagagatataggagagaaggaatatgagtaaagtatatataataggtacaggtccaggagatgaagagttattaacattaaaggctgtcaaggtattaaaaagatgtactgctgttctttatgatagattggtttcaaataatgttttgaattatctagaaccaaattgtgaaatttattattgtggaaaggaaccaggagctcattcaaaaactcaagaggagattaatgaacttttagttaaacttgcaaaagaagggcatacagttggaagaattaaaggtggagacccatatgtttttggaagaggcggagaagaggtattggctttagttgatgaaaatatagaatttgaggtaataccaggggtaacatctcctattgcagttttaaattatgcaggaatcccaataactcacagaaagatagcacaaagttttcatgttataacaggaaaatctgcgcaagatttaaatgtgaattttaaggctctagctaaagaagaaggcacattagtatttatgatgggattaggcaatttagataatatagtggaggagcttattaataatggaaaagaaccaattttcccatgtgcggtagtgatgagaggaacttcagctaagcaaaaaaaggtagtaggaacgcttgagaatatttcacaaaaagtaaaagatgctaaattacaatctccatgtataattgttgttggtgaagttgtaaatttaaataaagatttgaactggtatgaaaataaacctttgtttggaaagaatatatgtattacaagatcaaggagacaatctgagaaattaaaaaataaattagttgacttaggagcggaagttacaagttttaattctattaagatagaaagcagtgcggaaaacttaaatgattatatagagaagatagaaaattatgatcatatggtatttacttcagttaatagtgtagaaatattttttgattatcttattgaaaaagattatgatataagaagaattaaagctaaaatatccgcaataggcgctgctactgcaaattctttaaaacaaagaggaattatctgttttgcaaaggccagagaatttgttggtgaaggtttagtgagcatattaaaacctcatttgaaagataaccaaactctacttttgccgtgttctgcaaaaagtaggaaatatatttatgaagaactaacaaattgtggtgcaagtgtagataaagtatatatatatgatacggtttgtggatcagtagttaataagagatcttttgatgaagttgacatagtattcttcacaagtccgtcaacagttgaaaacatgattgatatgttagggattgaggaaattaagaaaaagcaggttatagctataggaccaaagactaatgaacctttagaaaagtacggaataaaagcatacgtatgtaaagaacactcagaggaagggtttctgaaagagatagaaaatttactgcaatagaggaaatagattttttaaaatgattaatatataaatttagatagtaaataaaatgagtgacatctttgaagatggctaaaataatggaggagtttgttatgattaaaagaggtagaagacttagagttaatgctgccattagagatatggtaagagaaacaagtttagattcaaaggattttatttatccaatttttgttgttgagggagacaatataaaaaatgaaatttcatcactgccagatgtttatcattattcagttgatagattgtatgaagtagttgaagaagttagagaagctaatatttctggagtattactttttggaattccaaaccataaagatgagtgtggttctgaaagttataatgataatggaattgttcaacaggcaataagagaaataaagaagcttgataaagaattgcttgttattactgatgtttgtatgtgtgaatacacttcacatggacactgtggaataatccatgatgaatatgtagacaatgatgaaacattagaatatttaagtaaaatagcagtatcacatgcaaaggcaggtgcagatattatagctccttcggacatgatggatggaagaattggatcattaagaagtgcattagatgaaaataactttaagaatgttagcataatgagttattctgctaaatattgctcggcgttttatggaccattcagagatgcggcaaattcagcgccacaatttggagatagaaagacatatcaaatggatccaggaaatagaatggaagccattcgtgaaacgcaaatggatgtagaagaaggagcagatttcattatggttaagccggcactttcttacctagacataataagagattgtaaagaaaatttcaatcttcctcttgtggcttataatgtaagtggtgagtatgctatgattaaagcagctggaaagcttggcgttattgatgaagaaagagtaatgatggaaactttaacatcgattaagagagctggagcagatataattattacttatcatgcattagaagcagcaaaagttctaagaagataaaagaacacaaatagatagtaattaaaaaatttatatattgtaaaaataattattcaccataattctaaaaatattacaagaattttagtcgtaattgtgaattgtgcattgcaacatatatatttaaatatataaattttttacaatttaaatataataatatgtaaatatgaaacaataaaaatataaacatatataaatatttatagattttatgcgggctaaggaggagttaaattgaaaaacgttgatatatttaaagaatcagaggaatacatgcctggtggagttaacagtccggttagagcctttaagggagttaatttaaatccgcctattataaaaagcggtaaaggcgtaataatcaaagatgaggaagataatgaatatatagatttcgtattagcctggggaccattaattctaggacattgcgacgatgatgttgtagaagctattaaggaagttagctcaatggcattggcttttggagcaccaacaaaattagaattagatttagcaaaatttatatgcactaatctggataatgttgagatgattagaatggtcaattcgggaacagaagctactatgagtgcagttaaacttgcaagaggatacacaaagagaaaaagaattgttaagtttgcaggatgttatcatggacattttgatggttttttaattgaagctggatcaggagtgatgacaggaggaataccaggttcacttggtgtacctaatgaaagcatagaaaatacgttaattggtatatataatgataaggaacaaattacagaattatttaaaaaatatggtaatgaaattgcgggagttattattgagccggtagctggaaatatgggagtaataaagtcagaaaatgattttatggaaactctaagagatctttgtaatcaatatggttcactactaatatttgatgaagtaatgagtggatttagagtagcatttaaaggagcacaatcactatttaacgttaagccagatttggttacttatgctaagattatgggtggcggacttccatgtggtgcatatggtggaagaaaagaaataatgaagaatctatcccctttaggcggagtttatcaagctggaactatgtcaggaaatccaattgttatggcagcaggtatagcaactttaaataagttaaaaaataatcagaattattatgatcacatcgaaaatataggagctagacttgaagaaggtataataaatatatcaaaaaaatatgatcttccggttgtaatgaatagagttggaggaatgatgactttattctttaatgatttaaaagaagttagaacttatgatgatgttaagaaatgtgatgtgaatagatttaatagatattttgaacatatgctaaaatcaggatttaatttacctccgtcacaatttgaagcattatttttaagcgtacaacataaagaaagtcatatagatgctttcttaaaagcatttgaagaatttgcattaaatgaaaataaaatgagtttataatagaatatgtgttaataaacttataaaaggaatgacttacatatgaataaaattaattatcaaaaggaattagattctttaattgaaaatttagtaaaaaatgaagaggttccaaccttactgcttcatagttgctgtgcaccttgcagcagctatgtgttggaatatttgtcacaatattttaagataacgatcttcttttataatcctaatatatacccaatggaggagtatactagaagagttgcggaacaaaagggtcttatatcagaaatgaaagtcaaaaatgaaataagatttattgaaggaaaatatgatacggaaagtttttataagttaactaaaggtttggaagaggaaaaagaaggtggagttagatgttttaattgttatgaattaagacttaatgaagctgccataatggccaaggaaaaaggttatgactattttacaacaacattatctataagccctcataaaaattctgctaaattaaacgaaattggtaaaagtttatctgaagaacatgatgtaaaatatttatattctgactttaagaagaaagaagggtataaacgttctatagagctttctaaacaatataaattatataggcaagattattgtggatgcgtattttctaaaaatgaaagaatgaacgatggtaatgaaaaaaataagtaagcaattattaaataaaatataataaaaaaagtacaacagataaatacttaatattatataataatacaaaggagaggattaatgtgtctgataaaattatagattttaatgaattaaaaaataaggtcaaagataaagacatagataaattcgaagagtatatttattctatgtattataaactggctgagggcaaaatgaatatgtctgatttctccaaaaatatattagcttacatggaagaaaataatatatcacaagataaattaataaatatacaaaaaaagtttctagaaagatatggagtagatccttctttaattcaggggcaatttaaaatacccggatttgatacgggtggaagcaacttagactatcagactattaaaaagacaatggggtttcaggaaaaatacaaaagcagaatatctaataaaacaatgtcagaatatttcataaaaaacgagaaaaatgatttgaaagtacttctagagaatttagatgttatattagttagtgagaaaagtatagacttaaatgataatgagttaaatgaatttttatgctcatataaaaaagtaatagaggataagaaaataaatatagtaatatgtgaaaatgtaaaaaattacgaatattaattttctaggtgaagtgtcaggtaaagtagatgaaactatataacaagtcccaattatcatagaatgttcttatatgcagaaaagttctgtattgcagtatatctgctcttttcataagtgcatagctgcgctttataagatgtatattttaggacattaaaaagttaagggtgagccataaagaaattagggcataccctttatttttttattctttaggaatttatattccgataaaatctgtggataatttaaaaaaggttgattgacctaggcgaagaatgtgtccgacgcgaagtataatctgaaggaaaccgaaggtaaagtcttgcatcagatatacgaattacagttgagaattagctttgttgcatcacattacctacgatttctataaatatttactctataaaggtgaattgaatattacaaatttaagtaatccctcggaaatatctataacatcatctttagagatatccgataaatcatgagcgctgctatttaatgtaatcagcttagcttttgagtgttcctgaacacatttatcgtaaagctcctttgaactttcataaggaaccatattatctgaattgctatgaattatcaaagtatttggagttgctttgttgacgtaagttatgggattatatttttttattacatcttctttatttgaaatagaagcaaaaatttttgataaatcataatttaaattttgagtatttaatagacttaaatcagttggtcctgcaaaatcaattaagtattttacttttgaagaataattgcttaattcgttatcatctataaattcatcatcaccactgtaacttgccatgagagaaagatgcgcgccggatgaaacaccaataatgcctatttcacttgtattaagattataggaatactgattcttatttatccatcttattgtatccttgacatcggaaatttgtttgttgaaattttccttttctttcataagctcataggaagtacttataattgtataaccttgttctctaaaagtatcgagtactggactcaatgcatcaggaatatttttatctccataagcccagcttccaccatgaacatatacaagtactggtgaagatttatatacttgatttattggaccgtaaatatctagttttaatgggacaccattagtatttttataaataacatctttgtaattcattgaacttgatgacttttgagtattgaattcctgtattgtccatacatgattttttaaagaaatatacttatcagcgattctatacgataacataattcttttgtaaaaaaacaaactaaaaacaaaaagtacaataaataaaattaagaaaaaccttttaaaaaacttcttcattaaataccacatgcctaataatcaataaaatttattcgggtatttataataatttaggcatatctcctttctgaaaagattttataatattaaaatactaatataggcaatctaaaaaatgtgtatagaaaacaagcgtttaagtacacctaaagactatattagaatttctatattaatataaatttatactataaatttatattacaaaagattcaaataattcgcaaattaagaaatttgcaatttattgggaaaaaatagatgcatttttaataaaaataaaagtataaataatattttatattagtatgaatatgaataatatataagaagaaacgaatagatattaacctttttgaaaggagtatatatgagcaatccttttggtatacttgtttatttagatgaaattttagttagaaatttatcctctttagtgttaactggattcatagaaacaataactagaactcaagcttttgatagaacattatcagcagggtttcatgagggagatagaatagaaaattctaatcaaggaagtgttacaagaattgagagaaaaggatttaaggataaaaatgaattagatgctaataataattttgagcatcatcatattgataaagaaatagatgcaaggcaatgtgtaagagaggaaagacaagttaaaactacttatactacattcgtattaaatggaagtttaattaactactttaatgaaaataaacagttgcagcataaaaatgaaaaagatatagaaaataataatatatatccaggagatctaattgagattgaaggaacaattacaaataaaagcattatgtcttatattgaaactctaattaatttgataacaatatttggagcggaatacttggatgatctaactaaagaatgtaatgtgaaaataaatttttcaatgtgcttaaaaatgctgacttatatgaaaagtattttagaaaataataacactacagatttaattatgaaatgtggaaatggaacaataatactaaacgtcaataaagataatttcatgaataataaatttaatatatttgataatataaattgtccgtgtagggtcataggaaaagtaataaaaacgtgcactgaagaacaagattctataagtttacttagaaaaactggccaagaacagttttatgaaaagttttttgagcaatttactcctcttatagagtgtttagagaaaaataatatttttgtaccagagtgcccagatttaagaattaatgattgcgcaatccaaataatgccattaaacatttacatgtaaaaaaatattatgattttcatgtgttttatggaaaaacacttgtttatctatagaatacatgataatatatattacaggtggaatatgtttatatatacttaaatttgttaattaataaagatatattttcatatttaatacaattttgaggtgatattagatgaagtttagaagtactaggggtctggataagaatatagaatctgctagagcaataattaatggaatttcaaaagatggcggattgtatgttccagatgaatttcctaaagtctatgatgaattgaaggaagatacgcatattaaatatgaagatctagcatttaaagttatcaatgagtttttcacagatattgatgatgcggaattaactggggcaattaatgacgcatataatgatagatttagtgtggaagtaaagaacaattttttagaattatatcatggaccaacttgtgcatttaaggatgcagcgttattatttttaccacaaatcatgaaaagagctaaaaagatttgtgatgttaaagaggatataacaattcttacagcaacttcaggagatacaggaaaagctgcacttgaaggttttaaaaatattgatggttttaaagttgtagtttattatcctaagaatggtgttagtgcaattcaggaaagacaaatgtcaagtcaagaaggaaacaatgttaaggtcattggaataaaggggaatttcgatgatgctcagacaggcgtaaaagaaatcttcggagataatgaattcagagaagggctatctcaaaaaggatttatcttatcatcggcaaactccattaatattggaagattagtacctcaaatagtgtattatttttatggatattttaatttagtgaaccaaggagtaatacaaaaagatgatcctataaatgttgtagttcctacaggaaattttggaaacatattagcaggatattatgctaagcaaatgggattaccaatagataaatttatatgtgcatcaaatgaaaataaagttcttacagatttctttgaaactggggtatatgacaagaaaagagaacttattttaacagaatcaccgtctatggatatacttgtttcatctaatcttgaaagattattatttgaagcaagcggtagagatactgaagttgttagcaaattaatggaagatctaactactaaaggtgtttatgaagtaaacgaaaaaattaaaagcttcataaaagaattttatggaaactttgcgactacagaagaagtgtatgatgctataaaggaagtttataagaaagataattacttgatggatactcatacagcagtggcatatgtagttaaaaagaagtatatagaagaaactaaagacgacaaaccaactttaatactttcaacagcaagtccgtttaaattcccaagaagtatttgtaatgcacttgatattgatgtagagggattagatgatttcaaagtattaaataaattatctgattcaacaaataataaaataccaaatagtttaagtactttggaaaatgcaaaagtaatacatgatgaagtttgggataagagtgaaatgagaaatgctctattatcttatttggattcataggtgataaatatatgattacagttagagtaccagctacatcagcaaatatgggacctggatttgacacgcttggaatagcattaaatttatacaatgattttgggttcagggaaatagaagatggtttgaagtttaatggaatgccagaagagttttgtaatgaagataatattatttacaaagcaatgaaatattgttttgataaagcgggctataaaataaaaggattagaaataagtgaaattaaacaagatgttccagtatctagaggtcttggaagtagctctacatgtatagttgggggactagtaggagctaacgaaatcttggggaagaagttttcagaagaagagttgttggagatggctgtagaaattgaagggcatccagacaatgttgcaccagccttacttgggggcatggttgttgcaatatttgatgaaaacaagacctattatgataagatagatgtaaaaaatggaattaagtttatttcgataattcctaattttagattatcaactgaggaagcaagaaaagtgcttccgaaggaaataagtttaaaggatggagtatataatgtatcaagagcagctcttatggttgcatgtttttctagcggaaaatatgaattattaaggtatgcatgtaaagatgcctttcaccaaaattacaggagtaaattaattcctggttttgaagaggtgtataataagagttatgaattaggagctctagcttgctatctaagtggagcaggtcctacaatcatggcgattatcgatgaaaaggatgagcgctttagcaataagcttaaagaattcttgcaaataaaaggattggaatggaatatattagggttatctttagataatgcgggggcaaccattatagaaggtacaaaatgatgagtggagattacttagttatagataaaagggttttgcctgatgtttatgaaaaagttctttttgcaaaaaaattattaaaagatggaaaagtaaaagaaataactgaagcagtaaaaatagcaggaataagtagaagtgtttattataaatatagagatttcgtatttgattttgcagaaacttcagagggtagaaaagttacctataatattatatttaagaatgaaaaagggcttttatcgaatataagtaattatattacagaaaaaggcggagacattttaacaataaatcaaggcataccgttaaatggttatgctaatttgagtataaccatagatttgtctacagtagatggagatataaaaacattgacagagggtttgcttaacataagaaatgttgaaaaagttgaatttataggaatggaataggaagggaaaccttcctattttaattatataaatttaaaaaatatcaataaaatataaaatctgttcaaaaatatgctagaataaattaaagtcagtagagacaagttctatatgcaacaaggaaggttttatagtaactataaagattagaaatagcacattattcagaaatggaggtgtgttttttattacacaaaattaaaatggagtgatttcatgattagaaataaatatgaaagtgattatatgattaaaaagcttggattaaatagaatgtcagaaaatatatttacggataattcgactttagatgaacttaaaagttatttagaagagaatacctataaatattataatataagagataaatctgtatcaggaggtaagtttttatatatgcttaccaaagatcaggtgttgctaaaaagcaaaaaatacaagagatatgcagtatatgagagtttagctattgcagatgatagattaatattacaaggtgacatagagatagacagagattttattatgagagcatcgttaagtgatataaaaggaatatcaaatagaattgcaatggaaaagccagtatataatatttataattacgatctaaaagaaaaaagagatccgccaataagtggattatctaaagttatagattatatatcacaaaattctttaattgacatggtggttgagttctctctgtttgaaataccggttggaataaaccaagaaaatataataatttgggaattaagaaactactaaaaagtgattactaaaattatatagaagtaaatatcatatattttttaatgaaaaaacaaacttcgttttcttatgattcatatgttaaaatttttgcaaatgtaaataaaaggcactcgttatgagtgcctatcaataattagagaaagcaaagtggaaagtttgaactctaacttatttgattttattatagcataaagaggggaatatatgaatgcctgaaataaaaaaacaattcagtataaaccctataattatttatttcgagatgaattaaagaaaatacaaaaacatcgaagagtttagaaaattccggtatgtttaaactacaaaaaatacaattattttttcagcttacaagtaatgacataaatttacatagaaagatgttataattttattgtaaaagggttttaaaataaaaatggggtgagataatgagagtattatgtaataattgtggtttaaagtgtcatattaaggaatggaaggaaaggcttgatgatttgctagcaaaaaagcaaaataacttattggatgatgaagtaatttgcttaagtcaatctattgatgatttaatatctgactgtatattttgcaacacaagcaatttatatagttccaatcgaagaaatactggtgaaagagattctattttatactactatggagagcagcatttaattgttaatttatataactacatagaagaaggaataagaagtaaagaaaatatctacatttctgttgaaaaaaatctttataagagattagaaaattatcttataatcaatagaattcctacagaaaaatttaaatttatgtgtttaaaagatatgaaatcaatgattgagaataatgataaatctattaaattaggagaagaaaaatctaggtggatagttcaaccatctttacaaaagcactttttatatgcagaaagtactttaaacaaacatactaaagatttagatttggacattctctatgtatatgatgcttatgagcatattcatagaaatgctaagagtgagttaagctctaaactattgggaaaatgtcaatattcactaaaaagagaaagtcatgaattatgggtttaatagtaatgtagaattaagagtcttataattaaggctcttttttgtgttacaggatcactgataaaggcaaagtcttcaaaaatataaaataaaaatagccttattgttgtatggaattataaagatgttaggttataaaattggattatttaaaggaattaagtaatgtggaaatttcaaaatgatataactaagcgtggcgtatacctccttgttcatgatcagtagaaaaatgcttaaatttcagacaagctcctataaaggaggagcttgtatatacatttgtaattataaagagtatttatctgccatttatattgattggtgaaaatgatatgctgccatcaccaattattataattttataatcatatttcataggacgcattacatatttcattgaatgtccttcgaaccttatagattgttgaattcttttattactatcgaaaataatcataaaaacttcgttaggagaaaggttctgaacattatacataacattttgcatgatacttaaatctgatatagtgtagaatccttctgaaaagttttgagggagagatgcagcagtggcagtcgttttattaatattaaatgtgattagtaaaataatagaaagtataaaagtaaattttttcattatttagccacctttcataatttaaattcgaatattgaaccgctcaaattttattattagaatttagataaaatatataacagaaatatgttagaagattaatatgaatactaggaattaatgaatataaagtaaatgtatctggtaagattgattagtaattacgttgccataatgaatatagttgtagtcgatattattagaggatgagaagtatagattacttaaagttgagtttccaattttttgcgtaatatcaataagctaaaaacatataaataaaaaaaaggagaattagttccaaatagatagaccccattagaaatgtataggggatagcttggggatgtattttgtaagataataaagtgatttctattaataaaaatttaaagaatgttgaaatattcttaaaaattttagaatattaactatatatagtcattaggcgtgatatagttaatattcagtaaaaatataagttgaaaataaatgctattataacagtaaattatgatataatttaccagtgataatagaaagtttaagtataagactattaagttagttttattgacatgaggtgtatgcggtggaaaatacagaaattgactcgaagattaatatgtttgaaagaaaaataggaagaagctctaatttggagttactaagaattttagcgataataatgattattgcacatcattattctgttcatggtggatgggatattcctaacgaactaagttacaacaggataattgtccaatttttaagtttaggtgggaaattaggtgttaattgctttgttttaattacaggatactttatgattaattcaaaatttaatataaaaaagtttgctaaaattgtaggacaagttttcttttattctgtagttataatgctgatttttaaattattcggaatatctcatataggaattagagaaactgctgaatcatttttccctataatattttctaagtattggtttgctactacatatgtggaattatatatactatccccatatttaaataagcttatcaattattgtactcaaaaagagaataagatattgattaccatactgattgtagtgttatcagtcatacctactttttcaaattcattacttgaaattgataatttatcttggtttgtatttttgtatttagttgcaagttatataaggaaatatcaacataagttttttgataagacgaaattacttttagtgatattcactagcagctatatcttaataatgttctcggtagttatactagatgtgttatctctaagaataaatgattttcctattgatcctacattcttaagagagatgaattccctaccaatgcttatttgctcaatttcattatttctttattttaaaaaattagatattggatctaaaaagataattaatagtatatcttcaactacatttggaatatatttgattcatgataataatcttgttcggagttacttatgggaacatattgctaaaaataattccttttacaattcaagatggttgtcgcttcatgctataattactatttctcttgtgtttttcatatgcatggttattgaaggtgcaagaattaattttatcggaaaaccagctatgaagttttgggataaggaaatagagagtaaattcctaaataaaagtagaaattatatagatagatctttctcccaacatatatcaaattaaggatgagaattttatcgtctagatttcattattgttatgaactaaaacttatattaaattattaagagatgcagacttagaagttacaaatatttctgagtttgttttttttattccttagttatctatatgaagccaaattggtggacattgagttgattcgttgcgggtataaatcacgagaagactgattcatttaaagaagtcttaagattagtaggagatttatgcttcacagtattatggagctgccttaagtagttttatgagcagcttaacataataagatgaatcataaattagtataaacttagaatgagtgcgtatactaaagtcaagaataatatgcaaaatagaaatttagatataagtacataagatattacaaaagaagattttagatctatataccttatataatatagattaatgatgataatatttaaccacgttagtttatatgttatttagaaataatatttacatatcattatgtagattactgatacaaatttttaatatgagctaaatctaaagaagtgtaaggagagataattatgactaataaacgtaaagtcactaaaaagcaaatggcatcattaggattaagaaagactgaaaatggagattatgattacataaatccaaatgatccaaattcaaaatataaacctgtaagaaaagagccaaataaatagggctcttttttcttaattaaatttatttaaattctatcagcggtattgtcagatttcataataacaatacgaattatattatgaaaagcaaaaaacaactgatagaagttttacagtatttattaaaaccagggttttaaaattattaagaagagtaaagaaaaaaatagttagtttgtgcacaaaaaaataactattgggagggattttataatttggagaataaactagttgaaaaattggatgatttaaatattagtgatactaatctgttgctatataaagatataaagttatcattagatgatattactataaaaagaattgaaaaattagttggccaaaaaactggttattataaatcaaataatacttttaaagaaaaaatgaattatattttagggggaatttatatgaaaagaaaaatagctttagtactatctgttgtagcgctttcaagtttagggggaggtgtatatgctcatgcaaagaccactcctgtagcatatgttagtgtagatattaatccaagtattgaattatcagtaaatacatttgatcaagttatttctgcagaagcatataatgaagatggtaaaaaggtgttggaagatactaacctagtaaatagcgatgttgatgatgcagttaagaatattattacaaaggcagtttcggatggatatataaaggaagacggtacatcggcagttgaaattactacagctacggataaagataatgtggcaacgaagttagatgaatctttaaaacaaattgccgacaaatcattagaggaaaataacatagaagcaacagttgaaactcagaatgttgctcttgcaagaagagatgaagcaagaacgttaggaataactccaggtaaactaaacttgatacaaaaactacaggaattagatccaactataagtgtagaagattataaatcaagttctgtaaaagatatacaaaagaagactaaagaattaaagaagatcaataataatgaagagactacagttaaagatgatgcaaatactggtggaaacatagagagtggtgctaatcaagatgcagttacagaagataaaataagcaattcttcttctaaatcaaatggaaatggaagtgttaagaaagaagaaaatagtgactcatctagtaaaagagaagaaaatgccacagcagttgaaaaatcaaaagataattcagctaaaactcaaaaacaaagtgataacggtaattcaaactcgcagaatggtaataaggataaaaataaaaataattaaatagtttaaaatgagtagctaatatagaaaataataatagctactcatttttttgcgataaccaatttaaatttagagcttcattagatccagtgtaggaacagaatgtataaatttaattggaatatatcgtgaaataatataaaaggttattattgaagaatcactagtaatagcattaataggatttatctatatatttgatatatattacatagaacaggagagaaaagaaaatataagtatttgatattgataatgtaaaaattattatattttttgaaatttgttgtcagattttatttatgtattacgaattgtataatatataacgaaattttaggggaagaaggtgcgttttgatttcggatattgaattactaaaacttttggatgagaagccggaaataggccttaaaaagctgatggataactatatggcacttatttacacaataatatttaataaactttctggaatgtattcaaaagaagatatagaagaatgtgtaagtgatgtgttttttgaagtatttcattataaaaatagaattgatttagataagggatcaatcaaagcctttttagcaattatagcaaaaagaaaggctatagatatgtatagaaaaaataaaaataataatcatcttccaatagatgatgtggcccaagaattacatagtgttgtagatgatgcggcgaattcgattttattaaaagaaagcaattctgagcttataaatgctataaaatcattaggagaacctgatagtgaaataattataagaaaatattacttacatcaaagttcaaaagacatttccagtgatctgtgtttaaaagttaatacaattgataaaaaagtttctaggtgtatggaaaaattaaaaaaaatattgggaggtgggagataaattggatgataaattatttgaattattagatgacttaaacattagtgatactgatttattattgaatgaaaatattaacctatctatggacttgtcttctagacaacgtattgaagaatctgtaaagaaaaaagcgggatacttaagcaagaaaaatacatttaacaataagataaaaaatattttagggggaacttatatgaagagaaaaattgctttagctgcatcgatagcagtagcatttagtttaggaggaggagtatatgcttatgctaaaactccagtagcatatgtcagtttagatattaatccgagtgttgagctaggagtaaacgcttttgatacagtggtatctgcagaagcatataatgaagatggtgaaaaagttctagaaggaactaatctggtaaacactaaagttgacaatgcagtcagcacagtaataacaaatgccatatcagatggttacataaaggaagatagtacaaatgtaactacagctgcagcagttgaaattacagtatctacagataaggatggtttagcagataagttaaatgaatctttaaaagaaactgcagatgaaacattaaaaaataatgatttggaagcagaagttgaaactgataaagtagcacttgcaagaagagatgaagcaaggcaactcggaataactccaggaaaattaaatcttatacaaaagcttcaagcactagatccaagtattaaggtagacgattataaatcgatttcggttaaggaaattcaaaagaaaactaaagaattgagaaaaatgactagaaatgataatgatgctgttgatgtaaagaattctgtagatactaatacgaatgttacagatagtaatacaaatactaacactggaacagatacaaacacaagcactagtaatcaggatgctaatgtagcgtctggatcaacagaagaagatattacatttacacaatcatcaataggagatcaaaaaactaaagaagctaagacagaaaaaggcaataattcatggaatgagaaaagtaataatggtaatttgaaaaaagaagaaaatagtaatgcagacattaatcaagaagaagacaaagacaggaaatatgaaaaggcttcaaatggatccgaaaaaaagggtgctggaactcagggaaatagcaactcatcaaagtcagagaaaagtaataatggcaattcagattccaaaggtaagggaaatgacaaaaataaatagacagtaatctaaactgatatattttctatagagacaggataattttaacgagtaaattatcctgtctctataaatattttaagagctctagaatactagaaaaatatttttcataaatttagtaatctaagttctaaatctatagaagtatgccatatatttatttagtattaacggatacaattgcaagataaatttaaacttattttgtgattgtatttgctatttcgacgtatcaaaaaatagaggagaatttaattttgagtagtagggtaataaaaaatatatttcctttaaaaaatcgcattagtacgatgatgtttaataaattatatgtaaaaaagcatgcttaggatagttataaggatgtatctgttgttgtgcgttgtaaagaatattgggtatattaggttaaagagtaattagtgaaggggagaagtttatatggggaaaaaatatgtaatgtttattgatgaaaggggaattagaagtttagataaaagcggaaatttctcaatggtagggttgatttttgaatatgattattgcatctattggaaaaacagtgaatgtgaattgaaaagaaaattaaatgagtataagaaagaatgtcttctggatagtgatgcaaatataccaatggataatataatattaaaagaggaagtatacaagaatattgataaaattataataagtgagtttgtaaataaattaccaacattgattagcagattaagatttaaaataatttcaagctcaattaagcaaaatttaaatgaatcagatgattcgtattcaatagtgacaaaaagacttttaaagaagttctattcatttattactaagaatgatggagaatcaggtgggatagttattgaagcaaaagtaggaaatagaaattgtagtataatgcaaaatttctttgatatatataacaatagaaatattaatttaagtatgcaagataatgttcagagtaaaattaatacatttattgtatctgataagaataataaaatttatggctctggaatagagatattaaatataataactaatgtattttttagagttctaaatggaaatagagaaattaatgagaaattaatatcatatatagagtatggcaacagggataagatatttagtgagcttaaacataatgtatacaacgatttagaaataggaatctcacgttctcaattacaagctatttctcataattatattgaaggttttaataaagaattaaaattactaaaagagcaattaaagcttaaggatactaaaataaaagaaaaggaaaaagaaattagtgagcttactagcgagattaaattgttatctaaacagttggagagagtgttagtgaacagaaaaatgataatatagtatcatggcttttgtatatatagatattgaagttagtgttttttgtaaagcgattataagtttaaaggattatttattcgcaattatttacttatatgataaggcagtatatgagaatttataataaaaatttattatattaaattaggaaatttaaaatgcctgaaagaatcttaaatgagcttttgggtattttgttttgtaagaaacataaagcaagacattggagttttatagatttctttcataagtattttaaatttctataaataagggaagtatataaaaaaataagctttttaataaagaggaatttatgaataaattatcttatgaaaatgaagtggaagattattctaaaaaatttaaggattttaagatgaaatctatgcaagacaatataaatctaggtataacgctttatgtacctaagggcgaaataaagggaatatttcaaattagtcatggtatgatggagcatagaaaacgctatatacagttcatggattatttaggcagcaatggttatatttctatagtccatgatcacataggtcatggtgaaagtgttattactaaaaatgattatggatatttttataacaacggaaccacaaatctcgtagaggatttacatcagataacactatatatgaagcaagggtacaagaaatatccttactttttatttggatttagtatgggatcattaattgcaagagcatacttaaaaaaatatgattatgagttagatggtcttatactttgtggttcaccagtaaagaataaagttataccgtatattaaaaaattgtgtaaaattatagaaaagataaagggagatcattatagatcaatttttatacataaaataattcgaggaataggcgataatgttataacaacctcagaaatagaaagagataagtttacgaatgatgaaggttgtggatttattttcacaataaatggttttgaaaatctatgtaacttaataaaaattgactatagcaaaaaagactgggcaaaaagaaacttaaatctcccgattctatcgattgcaggagaagatgatatagttattataagtataaaaagatttaatgaattaacacggtttataaaaaaaataggatacgagaaaatctttactaaaatatattcagacaaatatcatgatcttttacacgaagtaaataaattacaggtatataaggatattttaaattggatggatagagttaatagtgaaaagaaaacttgattttataaggcacatcatttcactttacaggtttgttacaatgataaatctatatttatttttgtactaagtcaagctctcaattaagataaaaatttagaaactcaattataatatatataattgcaaagtactattatttgggtttataatgctgttaaaggatgtgttaaatatgaaaaaaatagtttttggcggaggctgcttctggggtgtagagaaattcttttctatgataccaggagtattagaaacagaagtaggatatgcaaatggaaaaacagaaaatccaacatatgaagaagtttgcaaaaatgatacagactttgttgaggtatgctacataacatacgatgaaaaaaaagtttcgcttgatgaattattagataagttttggagtatcatcgatcctacgacattaaataaacaagctggagatgttggtactcaatatagaagtggaatttattatattgatgaatctgatgctgatacaattaatataagtaaagcgaaaattcaggaacaatgttatgcgcaagttgtaactgaggttaaaccgttaaaaaaatactatacagcagaagaatatcaccaagattatttagaaaaaaatcctactggttactgccatattaagtttaactaatattaaatattaatgagctactatattaataccggcagcttgttaaaaactatcttagaatagagaactatttttaagatagtttttttattctctaggaatttatattcaagttaaatctgtggatagattatagaaaagactgattcagaaagttatggtttgtaaggagaataaaaaagaaaatatattcgcctgccaaatttttctcacatacgttcgaaaaggcagatgcgtaaaaaatctacggctcaacagttgcctgcgatttttttgttttaagtgaaaactcacttggagatttcttaaacagatttttaaatgaacgtagaaaacatgtataatcattaaatccacatagtaaataaactttcgtaatttgatcaccactacttataaggtcctttgccattagtaatctcttttgatttacatagttatgaagagtatatccagtctcttttttaaacttatgcataagataatatttactaatataaaacttttgagataaagtttctgtagaaagattctcagataaattattatttatatatttcaagattttttcaatttgcttatcatatttgagagatgcttcatcattaatgtacatgttgttaagatgcactctatttaagtatacaagcaattgaataaataatgaattgctcaaaagtttactaccaaaatcttgtgagttaaaggaagtcattagtgaatctattataaacttaatgttatcttgtaatttactattaagtctaataagattgaaacttttttcattcgctagtctaaaacaagtagataaatcacaattttcatagttatggttttctataaaatcagaattcgcccagataataattctttcataaatttcagaagaatcaataataggtttatgaacatcatgattatttacaagtagaatatcccatggttttaagttgtatgcttttccttcaattaaataagttacttttccagataaaaaaattattattttattaaagtcgtgataatggaactcaaattcttgattttttttatcttttaaatgaaataattgaaaatcattgtttaagtagcctgatttattactatttttattcatagttgaaaactcccttaaaataactttaattacaaatgtattaattaaaaatataagatataaatatatattcaattaactctaagaagtgtatatataaatcttagttttatatatgtagtaataataaacttacatttaaaattccagtaagctaagtgcacaattataataataatgtaaaaattcaattgcaacatatatattaaaatcataaagcactttttgcagtatatcaagcaatatatgcactatttaatgcgaaaatgttgtatataatgaagatataagaagttaagtaattcttggaggaataaaaatgaagttatacaatttattaaaagatttagattacgaaataattagcggcagtgttgatatagatgctaggagtgttagttatgattctagaaaagtgaaaggaggttcagtgtttatctgcataaagggggctaatgcagatggtcacgactatatagatgaagcaataaaaagtggcgctttagcaatagtgatacaggaagaaattaaaatagataatgaaaatataacagtaataaaagtaagaaatactaagttagctttagcaagtatagctaacgtgttttataatgaaccttctaaagaaattaatttggttggagtaacaggtaccaacggaaagactacagttatacattatataaaagacatattggagtcatataaaaaaagaacagctataataggaactttgggatatgaatttaataaagaaaaagcaagcatacaaaaggttaatcctacaacacctgaatcattagaattacaaggattatttagggaatttattaataaaggtgctgaaaatattgtaatggaagtcacttcgtctgcattagcaaaacagagagttgagtattgtgattttaaagttggagtatttacaaatctatctcaagatcatcttgaagaacatggaacaatggagaattataagaatgaaaagataaaattgtttaaaaaatgtgagctaggagttataaatctagatgatggaatagcagaagaaattatacaaaaggctagttgcaagattttaacttatggaataaataaagaggctgatattagagcaactgagattagatatagaaatgattgtataatattcaaaatcaaatttagggacataaaatggcgctggtggtgtattacagatgtaaaagtaaatattcctggaaaaataaccgtatataatgttttggctgctataggagcttgtataggtcttggcatggatatgggtgacattataagctgtttatctaatctaagacatgttccgggaagactagaaatgataaaaaataatttaaataaaaatataatagttgattacgcacacactccggatgcgctagaaagactattaatgatggcaagagagacgactaaaggcaaacttattactgtatttggttgtggtggagatagagataagagtaagagaaaagtaatgggaatggcggcaggaattttatcagattattgcataataacatcagataatccaaggacagaagatccgataaaaataattgaagacattgaagaaggaatggaagtcataaattcaacttatgagaaaattgttgatagaaagaaagctattgaaaaaggattaaaacttttgaaagacgatgatttattaataatagcaggaaaagggcatgaagattatcagataataggtaaagataaaatatattttgatgatagggaaattgttaggaaagctcttggatagtgctagtatttataatttaagcatcaaaatttaggggtgagaaaattgagatttttaaagaactataaatcgtcattgattctagtgttatcgatattattaggcggggcgataggtattatcatgggagataaagctaaaatatttgctccactaggaaatttatttttgaatttaatatttacaatgttagttcctatagtattctttagtattgcttccgcgatagctaatatggataaatcaaaaaggctcggaagaatatttataataacattgattacatttggaattactgcaattatttcaggcataataggagtaattagtttcaaaatgtttaatccagcagttgggttggatccatcaatgtttaataatctaatgaccactaatagtatagatacacctaaaagtgtaggagttttagaaaagattgtttcgagtataagtgtaggggatttttctgaacttttatccagaaataatttgttagcactaatattattttctatattaataggttttggaactatgatttctaaggaacaaggcaaggcttttgcgtcatttttaagcagtggagctacagtgacaatgaaagttgtaaatataattatgtattatgcaccaattggacttggagcttattttgcaaatgtaattggacaattaggaggacaaatattaagtgggtatgcaaaaatatttatactatacttggttgtctccataatatacttctttgtattcttcagtatatatgcttatatagcaagtagaaaagaaggcgtgaaattgttttggaaaaatgcagcagaaccttcaataactgcattagcaacatgctctagtgctgcctgcataccagtaaatataaaagcagctaaaaatatgggggtatcagataccttggctaatataataatgcctcttggagttaacattcataaggatggttcggtgattgggggaatatataaaataatgttcttgtttgctatatttggcagagacataaatactattagttccttatttcctatattaggagcagggcttctcattggtgcagtagttggggcggtgccaggaggtggggcgattggtgaaatgctcattttaagtatatttggatttccacaggaagcattagctataatgcttgtaatagctacaataattgatgcaccagcgacattattaaattcatcaggaaatactgtctgtacaatgataatatcaaaatttatagacaagaaatagaactgaaaaatttgctaagaattaaattagaagctggatagcatattctttacaagtattttgcatataaaaatttgggctataataaacaatttacatttatataccttgaaaaggactatttcatagaaatttaatctaaactattagttattataaaccatataattttaataaaaaacttcaatcttattttggttgaagttttttgaaataatttttaattaaggcatatgaaagagaataacaaggtcaaaatgctatgattatttttcatcaggcaagaaagtagagtgggatcatagcaagctagtagggcaatctgctgatgcagcatgatggaaaatagatgtggcagatggatttgttattttttgattatgcctaatgtagtataatctatatagtatcgaaattaatggaatttatagaggagtatgcagaatgaaaaaaagttttaacatagatatatttttggaaaaatatcctcaggctaaagaaataatttctaaaaataatattaatattgaaaatcttaaggaaatctacgaagactacataaattataaaacttcttatgaaagccaggctgcatttatagcaaacattttacgatcgcagagaatggtgcattctgttaaatcaaggattaaagatcctgagagattaatagaaaaagttataagaaagacagaagatagaaaaaataaatacggagatgattttgaatttacagtaaataattatagaaatgaaataaatgatttaataggaattagagttatacatatatttaaagaccaatggcaggggatacatgattttataataaaaacttggaatgtaactgagattactgcaaatgtaagagaaggagataatatagatgtttttgatgatcctattatagaagtaaggtcaaaagcctctggatatcgatcagttcattatttagttgaattttatccaatcaatgaaaaggtaatagcggagatacaggttagaacaatttttgaggaaggatatggggaaatagatcataggttaagatattcccataatgaaattccggaaatacttaagtccaacttaatgctctttaatagaattgtaggaagtgctgacgaaatggcatcattaataaacaatttaagtaaagagtggggagataaagaagtttattataaaacaataataaaagatcaggaagcagaaattaatagattaaaaagtaaaatgacatggattgacgtagaaaaagattcttaatactaattttaagaagttaaatatgaggatacaaaatattataactaaaaatggaggagtttgaagtgaagacaattggatttataggtgtaggtgtaatgggaaaatctatggttagaaacctaatgaagaaaggatatgaggtatctatttatacaaggacaaaagaaaaagttcttgatgttataaatgaaggtgctaaatggtgcgacgatgttaaaagttgtgcaaataatagagatgtcataataacaattgtaggatatcctaaagatgtagaagaagtttattttggggaaaatggcattttagagaatgctaaaaaagagtcttgtataattgacatgactactacaagtccgaagctttctataaaaatttataatgaggctaaaaagagagaaatatatgctttggatgcgccagtatcaggaggagatgtaggtgcaaagaatgctacattatctataatggttggtggagatttagaagtttttgaaaaacacaaagatgttttatctgcacttggaaccaatataatttatgaaggaaaagctgggaatggacagcatactaaaatggcaaatcagatagctttagctggtgcgatagctggagtgtgcgaagcaattacgtatgcaaaaggagtaggattagatgttcagaccatgcttgatagtataagtgaaggtgcagcgggaagttggcaaatgaaaaatatggctcctcgtatgttaaaaggagattttgaccctggtttttatataaaacattttattaaggatatgaatttagcaatagaagagtctacggataattccataaatttaggcgtattaaatgaagtgctaaaaatgtataaaacattagataacgataatttgggtgatctaggaactcaaggtcttattaaatattacgaaaagtatagcaaaaattaatactaagaaattattccttattaattttctctctctatcagaagcagtaagtaagaaattcttatttactgcttcattttatatatttaaaaaaatactatgcagggattatttttttgttataataaaacatgtatattacatagtaagtttataagataataagggaagaatatattttataattgatctttagacgtttataaacttgaaaggaagaagacttatatggaagtttattttgataatagttcaacaacaaagccgcttgatgaggtaatagatgaagtgagttttggtatgaaggaattttacggaaatccgtcttccttacataatttggggttgaaaagtgaaagaaaacttaaagaatgcagaggtatattagctaaaactataaacgcaagtgaaaatgaaatacattttacttcgggtggaagtgaaggaaataatttagttctaaaggggcttttgaaaagcggaactcatcttattacaactccttttgaacatgcttctattttgaatactataaagaaattagaagaaaataatattaaagtaacatttttagagataaatgaagatggtaagattaacttagaacagctaaaaaaagctataactaaggaaactgtattggtttcaataatgcatgtaaataatgaagttggagtaatccaagatctaaaagaaataggagacataataagagcaagtagcaatagaactaaatttcatgttgatgcagttcaaagctatggtaaattacctatagacgtaaagaaaatgaatatagattttctaacagtgagtgctcataaatttcatggacctaaaggtgtaggatttatatatataaaaaatactagttctttatcaccgttgatagaaggtggatctcaagagtttggaataagagcgggtacacaaaatatatctggaattatgggaatggctttagcttctaagatttcaaatgataatatgaaaaaaaattacgaaaaggtatttcaaataaagaaaaaattcgttgataaattaagtaatatcgataatataaagataaatagtctactaaataatgatttttcaccttatatattgaatgtttcttttagaggtgtaagaggcgaagtattgcttcattatttagaggaatcaggaatatatgtgtctacaggatcagcgtgttcttctaaggaaagagagagaattggtggtagttatgtgttaaaatctttaggattaactaaggatgaaatatcaggaggaattagattttctttttcggatgataatgatgaatcagagatagattatgtagtagacattttagaaaaaggacttaaatttttaaggaggataaaaaaataatgagagaacttattttagtaaagtacgcaccagaaatatttttaaaggggttaaacagaggtaaatttgaaagaaaattaagagataatatagctaaaaaacttgatgggataaaagctgaatttatacacgatagtggaagatattttataaaaactgatgaaatagaagaaagtattaataggatcagtaaagtttttgggatacttgaagtatgtttagttagagaagttgacatagattttaatagtatacaagaggttgcgttagaaaaggttagacaatcagaaggaaatacttttaagattattacaaatagagctaataaaaaatttgaattgaattctatggaagtttcaaggaaagtaggagcatatgttcttactaatttagatggagaaataaatgttgatgttaaaaatccagatattttaataaatattgaaataagaaataattatgcttatgtttgggcaaatactgatataacaaagggcgcagcaggtcttccgtatggaatgaatggtagtacaatgttaatgttatctggtggtattgattccccagtggcaggatacatgatggctaaaagaggtgttgaagtaagttgtgtttattatcacagtcacccatatacatcggaaagagcaaaggataaagttaaagatttagcgaaaatattagctcaatatacagaaaaaattaatttgtacatagttccttttacagatattcaaatggaaattataaataaatgtagagaagatgaacttacaataataatgagaagatttatgatgaggatagcatgtagacttgcagataagtatggaataaattcagtaagtacgggagaaagtataggccaagttgcaagtcagactatggatggtcttattgtaagtgataattgtgctgatagaccagcatttaggccgttaattgcaatggataaaacagatataatggaaatagcaagaaaaataggaacatatgagacttcaattttgccttatgaagactgttgtacaatatttgttccaaagcatccgaagacaaatccaaaacttgatgcaataatgaaagaagaagaaaaattaaatgtggatgaattagtacaaaaatcaattgaaaatattgaagttgtaacattttagaaaaatacctcaggtttattttacctgaggtatttttttatataatttaaatattttaatgacattctaagttacacttgttatttgttctttgttgttatgatcaaaaatatatttatcaaagctaaataagcctactgaaataattaatattactacggcgaaccaaattgatttgccgccaacgtgtaaagttaagattccgcctaaataagctccaacaataaagaaaaagattataactaagtagcgaatacttttgaaagcaagttttttatctttttctataaatgctttataagcagcttgagatgcggaacgcaaattacctgtgcacatagctgtactatatggagagtcaattagttttccaaaagatgcgatttgaactgatgacacaaatgaaattggaactgttacaaatatgttagggactgtagttggtataaatcctataataaaaagcacaataatttcaataattaaaattatacgttccgcatttgtagcaaaagtcattgatggaactttaatatcttttatcctttcggtaaatatcaccccaagcacgaatgctaaaataggcagtaaagctgtaattgcttggccaggatttctcttcgtaagagctattccaagtaaaacaaggttaccagtctgagcattagcaaaaacttcacctctgcagacaaaggtgtaagcatctaagaaacctccaacaattgcaaggagaataccaagacgtactgattcagaagttttggtatggatgtgcattttttttattgcgtttaagtgtatatctttagtaatcaatgtaaaaagtcccctttcaatatatttccagtattaaaaatacttttacaaataaactattatattataacactaatttctatatagttaaaattaaggatataagaatatttaacatataacttataaataactatataaaggtttttgaaatgattgacatggtagaaaaaataagttatcataaattaaatgataatttagcacgctaaactgataaaacgataaaacaatatagagattaagcaataagaataggtggggtggaaaatgaataagaagaacatacttccagaaggaacaagggatttagtattagatgaatgtgcagtaaaacgtattttagaaaaagacattgataaactttttgaaaaatggggatataaagaagttataacaccgacgctggagttttatgaaactttcaactataattcacaaactttaagagaagaagatatgtacaagttcttcgataataggggtcgtatattaattttgaggccagatatgacaattccaatagcaagagttgtggagactaagctcaaagatgtagaattaccaataaagcttaggtatacctcgaatgtttttagagttcacgcaagtcttggaggaaagaggaatgaatatacagattgcggtgttgaatttataggacttgaagatgaaaaatctgatttagaaatattagtattggcattagaagctttgaagaaattaggattaaatgattttaagcttgaaataggaaatatcggtttttttaatggggcatttaaaaatttagaaatagagcaggaatataaagaggctattgcgcagtttatagaagataaaaacatgaaaagtttggaggattatttagagaatttagatataaaggaagagtataaggcattttttaataagttgccttggatgtttggggataaacagattttggaagaggctaaaaagttagcatttaatgaagagttaagaaaaaatcttgattatctggaggcattataccaggaactagatttgttgggctatggtaaaaatgtgacatttgatttaggaatggttccgagactgaattattacacaggaattatttttagaggttatggtgaaggtgttggcaatacgttactgagaggtgggcgatatgataatttaattgagctctcagaaaaatgtgttccagcagtaggattttcgatagatattgatgctgtgattccaactgtaaagttcaataaaatagcaagtgaaaaggaaaatatatataagatatactataataaaaatactagaattgaagctattaaaaaaagtgaagagcttaggaatcaagggtatatcgttgatttattaccaaatgaagatatgaaagaaataaaagtagttaagggtggggaatattaaaaatgagcataagcatagcattaacaaagggaagattagaagaagaaaccataaagatcttagataaggcgaaatttgatccttcagaattaaaaagcaaaggtagaaaacttgtgtttaaagataaaacgcaggatataaattattttttggtaaaggcagcagattcaataacttatgttgaacatggggtagctgatcttggagtagttggaaaagatactattttggaaagtgataacaattgctatgaagttttggatttgggatttggaaagtgtggattcatagtagcatcattaccagaaagtgatattttcaaaaaagttggtcatataaaaataggaagtaaatatccaaaagttgcaaaggattattttaaaaagaaagggatggatgtagaagttataaaaatagagggatcagtagaacttgcaccaatattaggcctatgcgatggaattgtggatatcatggaaaccggaacaactttaaaggaaaatggtttagttgttatagataggatttgtgagataagtgctagattgatagtgaataaagctagttttaaaatgaagcagaatgaaatatgggattttatagataggattaagaaagtgattaataattgacaaaattcgtgagatgttgataaaattgattatgatatcttgagtaattaacaaaaaataataaataaaatttaaagagtattttttgttgttattacttttttatcaagtcaaaggggggctattaattatatgttaaatttaatggagattaccgagagtaataaagaaagcttaattagtgaacttaaaggtagagttacagaaacggaacaagagataatctcaagtgtaaatagtattctatcaagagtgaaaaaagatggggataaagctttatttgaacttacgaagtcatttgataaggttgaacttaaaactttagaagtatcaacttttgaaattgatgaatgttttaataaagtggagaaagagttcattgaagcattagaagaagctaaagcaaatataaaagagtatcacgaaaaacaaaaatcaaatggatttttaatgacaaaagataaaggagtatacctagggcagagagtattgcctttagaaagagttggagtttatgttccaggtggaactgctgcttatccatcatcagtgcttatgaatgtaatacctgcaaaagtagcaggagtagatgaaattgttatggtaactccaccagacaaaaatggagggattaatccatatattggagtggctgcaagaatagcaggaattaataaaatatataaagttggaggagcacaagctgttgcagctttggcttatggaacagagagcattaaaaaggttgataaaattgttggaccaggaaatatatttgttgctactgcaaagaaattagtatttggagaagttgatatagatatgattgcagggccaagtgaaatattagttattgctgatgagaaatctaatccgtgttttgtagcagcagatttaatgtcacaggcagagcatgataaattagcatcatcaatattaatcacaacatcaaaagaattacacaagagagttgagatggagttggaacgacaagtaaagactcttgaaagagaagaaataataagaacttcccttgaaaattttggaagtgcaataatttgtagaacaatagaagaatgtattgacatttctaattctatagctccagagcatttagagctaatggtagatgatccaatgaaatatttaggtatggttagaaatgcagggtctgtatttttaggaagatactgtccagagcctataggagattattttgggggaacaaatcatgtattacctacaagtggtacagcaaggttcttttcaccgttatcagttgatagttttataaaaaaatcttctttcatttattattcagaagaagcacttatggaaaatggagaaaaaattataacattagcaagcaaggaaggacttacagctcatgctaattccgtgaaagtgagattagagaatgggaacgtataatgagtatataaattcgtatgatgagtatacaataaatctagatagcaatgaaatttatctagagatggacacaaagatactaatgaaaatgaaatcttgcttaactaatgtacttttccataggtatcctacaaatgagatgactaccattaaagaattatatgcaaattatgcaaatatagagagcaaaaatataattgtaggaaatgggtctgatgaaatgcttgaacttgttgtaagtaaggctattaaaaatggaaagaaggcattaactctaggaccagattttacaatgtatgatttttttgtttcaagatttggtggagaattaaagaaatatgatatagggcaaactatgaattttaatgttcgggaatttataaatataggaaaacaagaagccgtagatttaattatcttttcaaatcccaataatcctactggaattggaatagagttagaagatatagttaatattttagaagtttttaaaaatactgttgttcttgtagatgaggcttattatgaattctacggaaaatcaatgattccatatataaataaatataaaaacttggttgttacaagaaccttgtcaaaggcttgggggcttgcatcgttgagagtaggatttttgataactcatgagagtaatatttctgaattattaaattataaaattccatatacaataagttcgttttcgcaaaatctggcctcaatggctttgagatacccagaaaatgttgttaaaaatgcaaaacaaatagttaaacaaagagaagaattatatgagaatttaaaagaggttgaaaaaaatgccgcaatgaaaatacaattctatccgtcaaagggaaactacatctttggacgaacacctcataaggaagctcttattaagggacttgagagtattgggataataattagaaattttaatgatgacagtttcagaattacagttggttcaccaatgcaaaataggaaagtagttgaaggaataaaaaagatttttatatatgtataaatacttggcatgtttaggaaaataataagttggtatattgatttatttaaagggataatatttgattcaataaaaaataattatatcatttgcatattattttcttagatatgcttgactatagaaagattatgttttatatagatattattaatttatagaattcttttggaaaactatatttaaaatacaattaaattattcgttttaaggagaattagtatgtcagatagaagctcaagaagagaaagaataactaaagaaactagtgttagagtagaaattgacttagatggaaacgggaatagtgaaataaatacagggattggatttctagaccacatgttaactttgttttcatttaatagtaaggttaacttggatgtgtttgctaaaggagattcttatgtatgtgatcatcatacaatagaagatatcggaataacattaggagaagcatttaaagaatcactaggagataagcatggcataaacagatatggaactttttatgtaccaatggatgaaacgcttgctttagcgtcaattgatgtgagcaatagaccttttttggtttttgattgtgattttaagagagaaaaagttggtgaaatgtcaactgaaatggtggttgagtttttcagagcctttgcatttaatgctggaataacacttcatttaaaagttttatatggtgaaaatgatcatcataaaatagaagctttatttaaagcttttggaagagcaattaaagaagctatatctagaagtagtgataatgatataccatctactaaaggaagcttataaaaaattataaaagagaaaaatgaataatgctgattattagtaaaatatctgtaaagcttggggaatagagatgctaacttatcatttgttattcattttgatctttattataggagggggttatataatgatagttataatagactatggaatgggaaacttaaaaagcgttaagaatgccctggattatcttgagattgagaataagatctcatgtagtaaagatgaaatcagagctgctgatgcattaatattaccaggcgttggagcattcccagatgctatggaaactattgaaaagttatctttagacaaaataatatcagaagaagtaaaaaggaataaaccgcttcttggaatatgtctcggtatgcaattattatttgaaaatggatttgaaggaattgaaagaaaagggctcggcttattaaagggtagtattattaaaatgaaagatgataaagttaataatataaagatcccacatattggttggaatgatttggtgtttagtagaagcgatgaacttttcagaggtatagatgaagggggatttgtttattatgtgcattcttattttgcacaaggttataatgatgaagatttggtagcatacagcgaatatggggaaaataagataccaggtgtagttaggtgcaaaaatgtaataggagctcaatttcatccggaaaaaagtggatctgtaggtttggccattttaaaaaattttggggagttgattaaatgataattttaccagcaattgatataattgatggcaagccagtaagattgtatcagggagattataataaaaaagaaattgttgcagatgatgtatttgaaacagcaaaatcttttcaagatatgggagcagaatatatacatttagtagatttagatggggctaaaagtggaagtaatcaaaatcatgagttagtaattaaaattgctaatgagcttaatattcctgtggaactaggtggaggaataagatcttttgaaactattaaatatcttttagataatggagtagcaagagtaattcttggaactatagcaatggaagatgaagagttactaaaaaaggcaatagcaatatatgatagcaaaatagcagttggaatagactgtaaagatggcaaagtatatggaaggggatggcttgcggccagtgaccttgactatatagaatttgctaaaaagatggagaatattggtgttaagaatataatagtaaccgatattagtaaagatggaacattagaaggacctaatgtagaaatgcttaaaaaacttaagagaacagtaagtattgatattacagcttctggtggaattaaggatattgaaaatattaaagaattaaaaaacatagacttatatggggcaataacaggtaaagctatatatgctaaaacattgtctttagaaaaagcaatagaaatttctaaagaggggagataactggatgcatactaagagaattattccatgccttgatgtaaaagaaggaagagttgttaaaggaattaattttgagggattagtcgatgtaggtgatcctgttgcacttgcagaatattataataagcaaggagcggatgaattagtatttttagatataacagcaactcatgaaaaacgtgggataatggaaaaagttgttcaaagtgtagctgaaaaaattttcatcccatttacagtgggtggaggacttcagactttagatgatataaagtcaatacttagagcaggagcagataaggtgagtttaaactcagcagctgttagaaataaaatgcttataaaagaaggagctttctattttggaagtcagtgtatagtattggcagctgatgcaaagaaaagatctgataatacaggatggaatgttgtaataaacggaggaagaattgatacaggattggatctgctaaagtggattgaagaagcaacagcgcttggagcaggagaaattcttttaacatctatggatgcagatggaactaaaaaaggctttgatttggaattaacaaaagctgtaagtgatataactaatgttccggtaatagcttcaggtggatgcggttgtttagaagatttttatgatgtatttaaaagtaatatagcggatgcagcacttgccgcttctctttttcactatggggagttaactgttgatgaggttaaaagatatttacatgataaaaatgtttcagtacgtatataagtttaagattatataaaaagcaaatagctagtatatatctgaagggagaaaaattgtatggagatttgcaagagagtggaacaagttgattttgaaaagatgaatggattgattccaactatagttcaagattataaaactaaagaggttttaatgttagcctatatgtcaaaagaaagtttaaataagacattagaggataatacaacttggttttacagtagaagtagggatgaactttggaataaaggagcaacttcgggacattttcagtatgtgaaagaaataaaaatagattgtgataatgataccattttgatattagctgagcaagttggagcggcatgccatacaggaaatagaacttgtttttatagggatttgtaatttatatatgagaagcattggaggattaaaaatggatgaaaatataaaggctttatatgagactatattaaaaagaaaaacagaaggtgaagagggatcctatacgaagtatctttttgaaaagggaacaaacaagatactaaaaaaagttggagaagaatgcacggaagttataattagttgtaaagaaaataataaagaagaacagataaatgagatttgtgatcttacttatcacttacttgttctaatggctcaaatgaatatttcaattgaagaagtaggagcagaattggaaaagaggagaaataaaattaataattttaaaggtgaaagaaaaccgataacaaatgtttaaataagttctatttgtaattaagcggtattataagtataaaagtaggattgtttgtctgaacaatcctttttttgatgttaagatgcggaaatctgaataacataagttttagaattacaaaattttaacggttgattgtcaattataagttgagtattataatattagataaacacaaagtaaattttttattaattataggcaagaatacttataatattaaatataaaaaagaaaacctgtatatatagtacaggttttcgcatgtccactcgagaaaggaaataaatgaacatgttattgtgggtttataaaattttatggcgataaaccataaagtgtatgggctatttgttacaatattgataatttaattatacaataatcacaaaaaaaaacaataattttttatattatgacaattaaaatataagagaaataagtaaagtttatattgctaagtaatggcttttttatatagaaaaaattataagaaatttataggtgtataatatagatattatgtagaaactaacttgaatttaatgtagattaagaatgaaaatattaaattaatatataaatttaatattgcaatatataattacaaaataaaataatatgtgtaggagaatgaaatgattaaaatatataaagaagaattgttgaaaaataccatagattatgaagagtattcagaaaatgtttgtaaattaacactagaagaacttaaaaaagaagggttattggaatgtggaggttgctgcttaaagggagaaaataaaaaaggtaattgctcaagctgcaatagtaagaacagttgtaaaaaataatattattttttgatctaggattatatgattataaaaatataaaatatgttgtagatttaaacaaaagaataatatataatgaatttgtttatattataatacattagaaagatttggagggggccatctttgggaaagccaagtatttttagtagagaatatgaaaaaaggatgaagcgaagaagaagaaatgcgataataatatttttggcaataatattaataacatctgcgctatcaattaaaatagcgtataatccaatagattatgaaaatattaaacaaaatatacaggcatggattgatagtgatactaataattcttcagaacaaactaaagcagaaaaacaagaaacatctgatgagaaaaaagatgaggaagtagttcaagaagaacctcaaaaaccggtggaagaatatataaatataactctagcgagtggaaatgttgcaaaagcaatttatgtagatgatgctaataccggaaaagttttcaaaactttagatactagcgataatggtgttagttacagtataagtccatctggtaaggaaataattgtggaagatacaaattcagtaattactctatataatttagatggaacaaacaaggtgatatcaaaagatcaatatgtatctacaagtggaagtgtttttactaaagaagctacaattcaatcaaatccaaaatacttatggaatcagaatccaaaatttattagtgaagataaaataatatttgtaactaataggccatattttggaggtggaaatcttaaaaagtatctatggatgactgatatttcaactaatgaagataaggttatgtgggatttagctggagctaatatagaaattggtgaaaaggaagaaaaaggcgttaaaattactgttgatggtagagtatattttatcgatgtaaatggtaattatattcaatagagataatattaataaattatttgataagatttaagtgtttatggtataatgacttagttaaattagatgcacactatttaggaggaaagaataaaatgaaagctaaagtggaaaaaatagaaacaaatgtgataaaattagaaataagggttgaagctgaaaaattcgatgcagcgttaactaaagcttataataagaataagggcagatataatatacctggatttagaaaaggaaaggttcctatggcaatggttaaaaagttctatggagttgaagtattctatgatgacgctgttaattttgctatagatgaatcatatccagaagcattaaatgcagaaaatattaaacctgtagattacccacaagttgatatagtagaattaggagaaggtaaagaattagtttatactgctacagttactacttatccagaagtagaacttggagagtataaaggattagatataaagaagcctatatatgaagtagaagatactgaaatagataagcaaattaaagaaatgcaagaaaaaaatgctagaatagaagttaaaacagagggaaatatagctaaaggggatatagctgttattgatttcaaaggatacatagatggagttgcttttgaaggtggagaaggctctgattattctttagaaataggttctggtactttcattgataattttgaagaacaattaatcggtttagcagttggggacaaaaaagaagtaaatgttactttcccagaagcttacggaaaagaagaattaaacggaaaaccagcaatgtttgaagttgaaattaagtcaattaaagttaaagaattgccagaattagatgatgaatttgctaaagatgtatcagcagttgacacatttgcagaattaaaagaaaatcttaaaaagacattagaaaaaaataacgatgaaaaggcagaaagagaattcgaagaagctgttataactgcagtaattgaaaactcaaaaatggatattccagaagttatggtaaataaagaaattgatgccatgatgcaagatcttgaaggaagattaaaatatcaaggtttaagcttagaacaatatatggaattcacaggaaatacaactgaaaaaatgagagactttatgaaagaaaatgcagaaagaaaagttaaagctgatttagttcttgaagctattgcaaaaacagaagaaattaaagcaactgaagaagagttaaatgcaagagctttagaattaggaaagatttatggaccaaaagacccagaaaaaatggctaaaatcttagttaagtctcaaagaaacatgattgaaaaagacataatattagaaaatactttaaaattcttaaaagaaaattgcaaataatttattttaatatataatataaaataagaatgctaattataaattgccagaaaaaaatttttttctggcaatttattcaaataataattaacaaagtaataaaaaaaatatataattagaattagaaaaagtataatagtaaaaggaggatttatatggctttagtacctatggttgtagaacaaacaagtagaggagaacgttcctatgatatattttcaagattattaaaagaaagaataatcatgttaagtggagaagtgaatgatgatagtgctaatttaatagtagcacaattattatttttagaaagtgaagatccagataaagatatatatatatatataaatagtccaggaggatcaataacagctggaaatgctatatatgatactatgcaatatattaagtgcgacgtatcaacaatatgtataggtatggcagcttcaatgggagcatttttactttcttctggaacaaaaggaaagagatttgcacttccaaacgctgaagttatgatacatcaaccactaggcggttttcaaggtcaagcaacagattttgaaatacatgctaaaagaatattaaagatgaaagaaactttaaatagaattttaagtgaaaatactggtaagcctttagaaacaattaaagcagatgtagaaagagataacttcatgtctgcagaagaagctaaagcttatgggttagttgatgaagtaataactacgcataaaataggaaaagataaataagattgaattttaaatttatacgtttttaagtgaggtgaatgtatggctaaatatgatgaaaagaagcagttaaagtgttctttctgcggcaaaactcaagaacaagtaaaaagattaattgcaggtccaggagtatatatttgtgatgaatgtattgatttatgttctgaaattatagcagatgaattccaagaaactgttgattttgaccctaaaagtgtaccaaagccaaatgagattaaagaatacttagattcttatgtcattgggcaagaaagagcaaaaaaatctttagcagtagcagtttataatcattataaaagaattaatactaataaagaagatattgatgttgaattatcaaaaagtaacattttactactaggaccaactggttcaggaaaaacactacttgctcaaacattagcaagatttttaaatgtaccttttgcaattgctgatgctacaacattaacagaagctggatatgttggagaagatgtagaaaatattcttcttaaactaatacagaatgcagattatgatgtagaaaaagctgaaagaggcattatttatatagatgaaatagataaaattgctagaaaatcagaaaatccatctattactcgtgatgtatcaggtgaaggtgttcaacaagcattgttaaagatactagaaggaactgttgcatctgttcctccacaaggtggaagaaagcatcctcatcaagagtttatccaaataaatacttctaatatattatttatctgtggtggagcttttgatggtgttgataagataatagaaaatagaacaagaaagagttctatgggatttggagcacaaattcaagctaaacatgaaaaggatgttggaagcttactaaaagaaattatgccagcagacttattgaagtttgggttaattcctgaatttgttggaagacttccaatactagttactttagagtctttagataaagaagctttaattcaaattttaactaaacctaaaaatgctcttgtaaagcaatataagaaattattcgagctagatgatgttaagttagagtttgacgaaaagtcattaatcgcaatagcagaagaagcgattagcagacagacaggcgccagaggtttaagagctattattgaagatataatgaatgaaataatgtatgagataccttctgataatagaataactaatgttataataactgaagaggctattaaagagaaaaagcagcctagaattgaaagagtagaagaaggaaagattagacctactttagtaaaagctagaactaagaaagatattgaatcagcttaatattagcgagaataataagtcagtatatatttttttatatatactgacttatttagcgttttttacaagtttttagtattttaaatattggattgtttttatttatatttcaaaatcaagaatatatttgtaataataagcaaataatactaataataaaaattgaaggaggcaaagtatatttactttagtaataataaggaaataaaatgtatatattagtaaaggtaagtatatttaaagattatgacaaatatattaatgattttgcaaattatagttctaattctcatggtttatgttatgtgtaatgcaataagtaaaccacaaaaaaatagggagataataattgatagggaaaatactaaggaattaaataatctaaatagattaagacaaataagtttatctaagccacttactgaaaaaagtagaccatctagttttgatgaggtaatagggcaagaaaaagggattaaagcattaaaggcagctctttgcgggccgaatcctcaacatgttataatttacggaccaccgggggttggaaagacggcagcagctagattggtgttggaggaagctagaaaatccaaactatcgccatttacagaaaagtcaaaatttgttgagttagatgcaaccacattgagatttgatgagagaggaatagcagatccactaataggttcagtgcatgatccgatttatcaaggcgctggttctttaggtatagctggaattccacaaccaaaggcaggagctgttacaaaagctcatgggggcgtattatttttagatgagattggagagcttcatccaattgagttaaataagttattgaaggtattagaagatagaaaagtgtttttagatagttcatactatagttcagaagatactaatatgcccaagtacataaaggaagtatttgataatgggcttcctgctgattttagattaataggagcaacaacaagagcgccacatgaaatcataccagctataagatcaagatgtgttgaaatcttttttagggcattattgcctgaagaaatagagaaaatagctgaaaattgtgttaataaagttggattgcaaatttcaaaagatggtgttgaagaagtaagtaaatattgcacaaatggtagagaagtaataaatttgattcagttggcgtctggaattgctattaatgaagatagaagtgagattacattagatgatattaaatgggtattagagaatggacagtataacaaaataatttcaaataagataccatctcaatctagagttggggttgttaatggattagcagtatatggagcaaacattggaatgttaatgcctcttgaagttagttgtaagaaagttacaagtagaagaggggaacttaaaataactggaatagttgaagaggaagagataactaataacaataaaaaaataaaaatgaaaagcactgcttttgcatctgttcaaaatgtgcttacagtattagataatttattcgatttatcaactgatagatatgatatacatgtaaatatatcaggaggaattccagttgatggcccatcagctggtataagtattgcaacagcgatctatagcgctataactaagcagaaaataaataggtttgttgctatgactggagaaataagcatattaggatctgtaaaagcgataggaggagtgaaggctaaaatatctgcagcctttaaagctggtgcaaaaaaagttataattccacaagaaaattatgatgaatcactacatgaaatatgtgaaatagaaataattcctgtaacaaattttaaagaggtaattaagttggctatagaagaagatataattaatgaaagcgaacgagaaatattatcagctgaaggcaataacattttgaataacttgtaaagttatatttttaattagtacagtaaaatatgaataaatcttaatatttttacactttttcttttaaaattaatatattatgttataatagataaactaaagagtatttatagtagcatatatgctgtttgattaaacaaaattattataagtttacaaagcaagtgactaggtatacttgttttgtaaactctacaatatataatgagttttttatttttagaatcattgaaaaaaatatttattatgtgtatactagataagtcaaaataaataatgtaattaagatatggggggaaatagtactatgaaaaagctatatacgattccgctaattcctttaagaggattgactgtttttcctagtgtggttgtacattttgatgtgggaagagaaaaatccatagcagctattgaacaagctatgttagatgaacaagaagtttttcttgtagggcaaaaagattcaatgatagaagaacctaatcaagatgaaatatattcgattggaaccatatgtaaaataaagcaaatcttaaagatgtctgataatactattagagttcttgtggaaggccaagaaagaggtaaaatagttaaatatatagaggaagaagaaaattatataaaagtttcagtaaaaaaattagatgataaagtggttaagaatgaggaattagacgcctatattaaattcttggataaagaatttatgaaactacttaagttaagtgaagataattttggagaagcagttaaatcaatagattcacttgaaaaaccaagtcagtttgtagacatggtagcttcttatgcaataactgatgaaaagcttaaacaagaaattttggaaatagtagatataatcaagagagtagagaaagtactagaaagaattaaaatagagatttctatagcaaaaatccaaaaaaaaattgctaataaagtaaagaatacagttgcaaaagagcagaaggaattttatctaagagagcaattgcgcgcaattcaagaagaattgggtgaagatgatgaggacaagaaagaaatagctaagtatgaagaaaaaatcaagaaagctaaacttcctaatgaagttaaagaaaaggttaattacgagttatcaagacttaaaaatatgagtcctacgtcatcagaaggcaatgttgtaaaggcatatttagactgggtattggatatcccttggggtaagaatacaaaggaaaatattgatgttactaaagcaagagaagttttagataatgagcactatggattggaagacgttaaagatagaattatagagtatttagcagtaaaacaattcagtaagtcccaaaaaggacctattctttgtttagttggccctccaggtgtgggaaagacatctatagcaaaatctatagctaatgccattaatagaaaatatacaagaatatccgtaggtggaatgaaggatgaagctgaaataagaggtcatagaaagacatatgttggtgcaattccaggtagaatagtctatgcaatgaaagaggcaaaatctatgaatccattaatgctttttgatgagatagataaaattagttcgagctataaaggtgatccatctgatgcattattagaaatattagatagtgagcaaaacaaagattttagagatagttatttagaagtaccgatggatttgtctaaggttatgtttatagcaacagcaaattctttagaaaccataccaaggccgcttttagatagaatggaagttattgaagtatcgggatatacgtatgaagaaaaattcaatatagctaaaaatcatcttattcctaagatatttaaagaacttgatattccgcaagataaaattgatatagaagacgattctattagaatggttatcgagggatatacaagagaatcaggagttcgtggattagaaagaaaattaagttctttaataagaaaagtattagcagaaatgttaaaaagagaacaaaaggaattcctaattaataatgaaagtgttgaaaaattattaggtaagaagacgtttgattttgatcaaattgataaagtggacaaggttggagtagttacaggaatggcatggactgcatatggaggcgatacgcttccaatagaagctatggttatgactggatcaggaaaacttgaacttacaggtaagcttggagatgttatgcaagagtcggcaaggacagcgtacagttatgttagagctaatgcaattaagtttgggataaatgaaactttttataaagagaaggatatccatattcatgcaccagaaggtgcagtgcctaaggatggtccatcggcaggcgtgactatggtaactgcacttgtatcagcactatccggtaagaaggttaagcataatgtagcaatgacaggtgaagttacattaacaggaagagtgcttccgattggtgggctaaaggaaaaatctttagcagcatttagagcaggagtagatactataataattcctaaagaaaatgagaaagatatagataagataccaaattcgattagaaatagcttgaatattatttctgctaaagaagttaatgaggtattgaaaaatgcactaattggagaggatactaatgagaattaagaaatcagattttattacgtcagcagtaaagaagaatcaatatcccatagataatagagtggaagttgcatttgttggaagatctaatgtaggaaagagttcgctgataaattcattaaccaatagaaaaaaacttgcaaaggttagtcagactccaggaaaaactagattagttaacttttttcttataaatgatgatttttatttagttgatttgcctggatatggatatgcaaaagtttcgaaggcggagaaggatagctgggggaaaactgttgaaatgtatttgactggtagagaacagctaaaaagagttgtcttgcttgtagattctaggcataagccaacaggtgatgatataattatgcatgaatggataaaacattttggttatgacgttatagtagtcgctacaaagagcgataaacttacacggaatgaattaaagaaaaatgagaaagttataaaagaaacactcaaattaaattcagatgacaaattatattttttctcatcattaaataaagatgggaaagatgaactaatagataatcttttcttagaatttgcgacagatttagattagtaaaatattttttataaatttttatataatagtaaacaaataacctcttacagatataatatttgtaagaggttatttctatttaagtaatgatattatttattaaaatagctgataaaaaatttaaataattataagttataaaaaatagtgtcaaaaattttaggtaggaataatatatagtataaaaaagaaaaaaatatttccaaggaggaataaaaatggagatgaatgatatcctaaatggtttaaattcatgtgatgatgattgttcagattcaagttctaacaattgtggttgcgggccaaactttggtggaccaggaatcggaggttttccagggggtataggaggctgtggacaaggattcaataatggtggttgcggatttaacagctggatttggattttattaatattattctattgtggctgtggaagaaataatttaggaagaggtaatgtaggaagtgattgctgctgtgagaaaaagtgcgattgctgctgtgaaaagaaagattgctgttgcaacaaaggcggagctaatagtggattcttaggtagttgtgcaccatatttgtttatattagtactattattcctttgcaataataacaatggaataggcggaggatttaacaattgtggatttggcggaggagtaagtcctttcggtaataattttggttgtgctgctaattgttaagattcttaatttttaggaaggagagataaatatgtctaaaaggaagaataaatgttgctgtgaaaaaagacacaatgaatgttgctgctatgagccaagatcaaatgcttcagatggtttattaggaagtggttgtacaccaatcatatttctattaatagcatgcgggtcaggtttattaaactgtaacaaatcatatttaattattttactatttatattatgtggtggatgcttctctaatcttttaggaggcggacgaggagaaagtaattgctgctgctaggatagtggatagagggctttaatggccctctaaaaaaatgcataaaaacataaacatttttagaatgatatacatatattaaaaagagacaattttaagtgagaggattttaaaatggctaagcataaacatagagaacaagatcaaacatcaaatgatactagttctaatattaatgataatgctagaaatgcaccttttggaattgatcctatgcagttaatgggattactaggtggaaattttgatatgaataatatggggaatatgttagcttcaatgaatacaaatggatttaatttgggaaatttaaattcaatagctcaaatgatggggttaaatttagataataacttatttcaaggaaatatgagtggaagtcaaagcaatgtaaataataagaatatgtattcaaatcctaaagaatattctagcaatacgaatcctaaaaattctgaaaatctaaatgaagataaaggtgttaaaaagaacaatgttgcaacaaatagaaatattaaggataaggatgcgaacttagaatttttaatggcaattagaagttatgctcatccggatagaataaagtttattgatagaatcattgaagcttataagaatggagaactcaaagaagcataaaaaaataaaaattattttttaaattgtgtatacaaaaagaaatcatgtcaataatattaatgtaatagagaaagtattctcttacaaacttaatggattattaagtaagacttgatttagagaggtatttccatctaaaatctagttaagcttatccagaagtttaatgccgtttggttaacatttaaagagtttgatgtgttaatggcagttcaactatcggataaattttttacttcattaagtaacccctcatccccctttaggccgctaatgcggccttttatatttatttagctttttgtatactatttattttataagaagaaccttgcttttcaaaatctattaataatatcaactcacttttattatttgtacctttaagattgcttttttcaaaagatagtctccaccttatagctgagggctctaatgactcagtccacttataatcataaaaaaatgcattttgaaaagtatacgaataattatctttatctaaactccaaagtaaagataaattctctttgtcaattgtagaagagaagatatctggaagatcatcaactacgtaaggaagctcaactaaattgataaaactcgttgcagaatctaatgaaggaagatttgtattatccttactagtatctaaaatatcattattaatgagcataaagctatttaatgaagaaagcccttctgatgatgatattgaataacattgaggagtcttagaatttttacaatccaatataccaaaaatattattattacttgaatagagcaaattaaagttttttttattccacttaaatacataagacatagacttatcatttttagagccaagaagtataatttcaggaatattatctctagaaagattatgaaaataaactttaggctcaaaatgaagattagtcgtgaaaagtgttttgtcactaagttgattggaaagataatgatcattatcaaaacaatttatattaaaatcaaccttattttgtgagcttaataattgaaaagtatcttttttgccatcacctgttaagtcatattgtgtattttgggtaatgtttattggagatatagtttgtaaagatttaaacttattagaaataaagtaaaccatgcctaaaattaaaaataatgctgatatatatagtgctgagtttactaaaatccttttctttaatattatgattttcattatatatcacctcaataaattatatgttgatatagtgatgcatattaataatataaaagcgataaaataaaaaaagaccataacttcacgcaaaatattttttgcctaagttatgatcaggatgaagaaaataacaattatttgcagttgctacaataaccataaaaataaaccttatttgaaacaatctgataatcagtatgctcttttgctaaagcattaagattatctagagatagatctttaaaatcatctactctcccgcaacttaagcattgtaagtgaggatgaggtaatgaattaccatcatatctaaagtttccttcaccaacatttatttcttgaattaatcctacatcaactaatgtttttaatgctttatatacagtagctaaactcatagttggatattggatatgaatatcagaataaataacgtctgctgaaggatgagaagtagtattaattaaatagttatatactgcaagtcgttgaggagttaattttagctttttttctttgaaaactgaagctatttgatccattttaaaaacctcacttctattagttttatgtatcgattatagcatagaaataaagaaagagtcaattaattaattaatactatttttaaacaattattattatttagagaaatattgttaataaaaatgcaaagaaaaagattgagttcgcttaatttgaacatttaattataaataaacactcaatttcaattaattttctgataattgaatgaaaatatcaaaaatttgttgtacattaaagaaaagtctgttaaaatataactaagcagagtgtgttaattaattaacatactatagtaattataattactatttctacaaaaaaatgataatttttattacagacttaatcaaaatcatttagcctatgataaaaatataaatagaaattgatgaggaggcgtatttttgtgggaaaatataaagttggggatgaattaataattgtaaatgatccaagcaaggataatgagaagttaaaggaattaacaaaattaactgttgatggagacttcgcacaaatatcttggggaataaaaatattagaagtagaatatgacaagccatatgtgacattaacttataaaaatgttaaaggcgagaaaaataaagttttttctgaatgtagagacatagagaactttgataaagaaaaagttttggaaaaggcattacttagagcattccaaaatgaacttataaatatatcagttgttaagaatatttgtcaaatataattataaaaattaaggagcattataaaaaatgctccttaattttacatagaattccattgtaaaatctttacttttaagggcgtttgtaatataatgaattcataaatttatgagatttataaattattaggatgagaaaaggatggcgggttttatgagtaggtgtccattttggtcaacaacaaaagagaaagtggagtgttatagtgaatgccctataaaaagtgaatcattaaaagggcaagatgataagctttgcatttttaatgaatgtagtgagtcaagcagtatcgattttaaggaaattatgaaagaagactacggttttctaaatttgtctatatatgatgacgaaaagagaacaaatattaactattaatgctaaagaaatatagattagaatatatgaaaatattctaatctatatttttattgataaaagaagtatatgtttatttgatctataaaaatattataatatttatagataagttcgcgaattaacttagttttgtagagttttactcttgtgcttcataagagtttgtatatttatgaagaagagaatgttttaaagaccataaattttgggataaatcaacataataagtatgaggattttcaaatctaagtacttcaggccacagcttatcagtttcaagttttgaaaaatcttttatttctaaaactgtaggagattcatacacgcactttccacttttgaatattggtgcttgaagttctttagtgtaatagttcttgattttttttctcttccatgtatgaatagggtcgaatattattaatggttcattctcgttaatgttttcatctcttaaagtaattaaatcagcaatggccttatgagagtttttatcaaatattcttattatcttcttaaaacctggatttgttattttttcttcattttcgcttattttaattttagggataatgtcattatcaccttccaatgcaactaatttataaacgcccccaaaaactggttctgacttagcagttataagtcgctcaccaactccaaaagagtttatacatgcaccttgatctaatacatcttttataatatgctcatcaagagagttagaaactacaattccacaatcttcatatccagcttcatctaacatctttctgcattttcttgttagataagtaatatcaccagaatctattcttacgccacgaggtctcttgccaagaggttttaaaacttcattaaatacttttattgcatttggaattcctgactttatgacattgtaggtatcaataagtaatacacaatcatctggataaatttcagcccaggctttaaaagcatcatattctgtatcgtataattgaacccaactatgagccatagttccaacagcagggatattaaacattctgtctgacatagtgcaggctgttgaactacatccacctataatagctgctctagcaccataaattgcgccgtcataaccttgagctcttcttgaaccaaattccattacaggacgcccatctgctgctctacaaattctattagcttttgtagcaattagtgtctgatgatttattgttaaaagaatcattgtttcaaggaattgagcttgaattacagggccacgaacagttacaagaggttcgtttggaaatactgggtttccttctggaacagcccaaacatcgcaactaaaatcgaagtcccttagatagtcaagaaattcttcggagaaggcgtgtttatctcttagataagtaatatcgtcgtcagtaaattttaaagtgcttaaataatcgattaattgttcaactccagccattatacagtatccgccatcatcggggattcgcctaaagaacatatcaaagtatgctattttgtctttaagtcctttacggaaataaccattacccatagtcaattcataaaaatcaactaacatcgttaaatttcgttcatccttaacattaaaactagatttattatccataataatctcctttaaaaaacatgtaaataattttattttataattatagtttaatccattataaattaaaatgcataaaactattgtacatctataagagtttgattacaatatagttgcttataacttaaaatcagacatatattaattttttgaatttaagtagaaaatattcagtattatgagaggaaaatgaaattcatatagtaaatatggaaagaatttaaaatatgtaagtcttatataaagaaattcataaatgctgaaatgtaaataggaatgaaagaaggagcattacagtggggtacgatcttgataaatatcagatggatgcagtaaaggcagaagaaaaaaatgtcttgatagttgcagcacctggatctggaaaaactacggttataataaatagagttgattatctagtaaagcataaaagagtagctaatggaaatataatagtaattacatttacaaaagcggcggcgcagaatatgaagaatagatatgtatctaaattcaatacgaacagttcacctttttttgggacattccatggcttattttataagatacttttgagatgtggaagaaatatcgacatagtcgatggggccgttgttcacaaaatagttagtaatattttaggtaaatactttgatgaagttaatgaagataaaattaaagaagcaataaataacatttctttgtataaaacttcaagagttcctctaaatgaatttaagccatcaattgcaaaagaaatttttgaagaagcattggaaaaatatgaagaatataaaaaagaacacaacaaaagagattttgacgatctagctatagaagtattagaattgctaaagaatgataagaatatgttgttgtcttataggaaattattcaagtatgttttagttgatgagtttcaagattgtgatgaaatgcaaatagattttttaaggttaataaatgatggggaagataataatctttttgcagtgggagatgaagatcaatgtatttattcttttagagggtcaaagccagagtatatggttaactttgataaaatatttataggtgggaaaaaatattatttatctataaattatagaagtagaatgaatatagttgataaatcaaaaactgtaatagcgtataatgaaaagcgaaataataaagagataaaatggaataaagagtgtgaggggattgttaagtggtttaatccatataatgaaaagatgcaggctgaaagtttgactgatatagttataaataataaaactctaggaattaattatgaagataatgcagtattgtatagaactaatatagagtctatgtctgttattgatgtattaactaaaagaaagatcccatttacactacttgatagagaatataatttttttgagcattttatttgcagggatttaatctcatatttaagattaagcgtagatgaatttgatagaaatagcttcttgcaaataataaataggcctttcagatatataagtaagggaaatttattttatataaaaaattatgatagagaagagagtccatttactataattattagcaaagaagatacaccaccatttcaaaagaaaaagcttgatgagttaagaaaagatataaactatttaaataagatatctttatcatcagcaattgcatatatagtaatggatctaggatatagagattatcttcagaaatatgctaataaatttaatcaaagttttgaggatttagaagatataatagaagaatttaaattatcagcagaaggatataaaactatatttgaatttctagaacatatagaggaagtaaaacaaagtatagaggaaagtaaaagaaaaactaagagagaaggcgttatcttaagtactatacatggcgtgaaaggaatggagttcaaaaatgtctatgttataaattgtgtagaagaaactatacctcatgcatcaagtataaaggaaaatattgaggaagaacgaagattattttatgttggaataactagggcaatagataacctgtatctattttctccaagaagcaggaaaggccaatttaaggatgtttcgaggtttattatcgaaggaaaattaaatgatatgcctgttgacacttatggatacgagattggaaataaagtagcccatagaacttatggtgttggagagattactggatttgatgaaaatgacaaagataagattaaattgaagtttgatgatggaatttttagaagtttttctttgaaaattttggttgataacaatttaatatcaaaatgttaaattaaaaagattgagtaaatgaaagtatgttcgttccatacccgtaaatagttaatttttgatatagaggatggaatgattagtatggcaaaactacgattaaaaacactaaaaattaacaataattcaagtaaaactgtagaggaatgctatagtgaatatatggattattgtaagtctatagggcttaggcaggcgactttagttagtaagcaaaggttttatacttatgaattattaaaacatgtatcagcagatgatgaaattaatattatcactcaaaaaaagatagagggatggattaattctatgattgattatgggtataaggggaatacctatcaaacttttgtaattaaactaaaggcgtttcttacctattgctttacaagagaatatttaaaagaatatgaagttaagataccaaatgttattttagagaaaaaagaaatctacacagaagatgaacttaaaaaacttttaaaaaagccagatttagatacctgccttgtaggagattatcgttcatttgcaacggtatcatttttagtaggggcaggatgtagaagtacaacattattaaatgtaagggtaaaagacattgattttaaaaaagaaatgatattattcgcccacatgaaaacaaaaagacaggttaatgtaccattatcaaagtcattgaaattaatactaaaagattatattgagacaatgaatttaaaaaatgaggatatattgtttcctaagctagatggaactaaaatgagttatgatacattgcacgaaaacttagtaaactatttcaagcactgtaaagttaaaatgcgaggagtaaatacgttcaggaatacatttgcaactatgttcgtcagaaatggtggagatatctacagattaaaattattattaggacatagtaatattaaaactaccgaaaggtatgtgaatttattacctatagactttaaagatgatttgttacaatataatcctctggatatattgaataagaataaaaatgagaatgggaaaatgaaaattaaaaagaaataatataaatttacgtaaatattttaaaataataatgataatttaaattggtttagttatgaatgtatacttcattttgtgagatgtgtaagactagaaaaaattctagtctttctttgtactgaaatttacccaatattcttctataaacatattgtaaaatttttcgaagtatagttttaagtatgggtgtaaattggaagtagaaaagtttctaacaaaaattaaggtgttattattaatatatccttcgataatcaattgtttaaatgaatttttaaaatcctcataattgtattgtgtatttttatcagagataatatcaagatatagtttatcaaaatcattatgataccttttctcggctatatcaaattttaaatataaaagtatttgagtagcagtttcatcgatattaagtggctgttgctttaatttagttatttcgtttgttacttcttttattttatgagttatttgttcaatattgcttaaaattattttttgctgattagtaaaattatgaagtttgtcatttaaataatttaaataatttttcattacagtaaatttattatttaatgtagagccataatgcaaatctaaaacttcaggtaaagacaaatcatcaaatattgcaccactttcaatctcaaaaagttcgtttggtgttatatctaggtgttcacaaagtatatctaaatgtgccatatctaacttttcaaatgaattagtacaatatctattgattgtgcttttattaataccggtttcatcggataactgttgttgggaaatttttttgttttttattatagaatccaaattaagttttgccataacttttatcacctcagatatattatatgtcataaataataaaaatacaatatttagggataaatttctaaaaacggtattgacaaaaacgtgagctaatagtatattattcctatagataagaaaaatttcttgaatagaaattaaaaaaggcagtaacatatagttaccacctacacctaagcaatgtaagtatagcatatgttactccttaactcaattattttaggaggacaagcgatgaggaagaacaaaaaacgtaaaaattcagtgattaacttaaaaaaaagggaagaaaagtatagaatacatagttatataattgagcaattcaattctttaataagagatatgatgccctattttaggaagattattataaattatgtattaaaaatatttgaaaaatcaatttcataaaacgatgagaatgttaaaggctagggagcaataaaaactccttagtcctatttttagaataaaattttttgataagggtgcttagtcattagcaaatcattagatttttttgctatattctttaaggtttttttgtcaaaataattatatattgtgccaacggttaatcctgtaaaggttgaaatttgttcggttgtaaatcctttagttaacattagagatattacggatttttgaattgtacttatatttaattgtttctttctctctggggatatatcattaatattgttaaacgaatcgttaattatgctcatgattgtagttgatgacatttttctgtattttttaccataaaaagtatagaataaatatttgaaggtttcaattttgttttttgtatttctaaaatcaatatattctttataatctttgaatagtgaatttggtaatttaaatttatagttatttatttctaagtataacttgttatcatgagatgtaaaatcatctatttttaaattttgaataacttctatactagggcaaataaaaagatataatttaaataataatttatttctagaataactagacttattttgagaataataatttaagagagaatttgcttcatctaatgttaatggtgatatttcttttaaatctttattgcaatattcatttattatttcagatagaaagttttcagaattaaaattattaaagtgtttagtttgaagtttaccacaatcttctaaatactttaatgtagaagcaatatagctacatttattaatcaaagttgattttgcatattgtttttttgaaaccatatcatgaaagtagcctaataatctagttggatttaataaagattcatcgcaaattctctcattattatcaagataatcaaagaaattgaaattggcactttgatattgtttaaaagatatatcgtttgaaaggcttcgattatttatagtgtattctttaaaatatgcaaaatatctacttgatttcttttggaaaattcgattatatgaaaaatatttaagattctcatcattttgaactttagagtatttaaaaccaggtttatatattaataagtattctaaaactactctgtattcagcatctacatcaagtgatttgtttaaaagataatagtggttaccatttgtaattattccccattcggtgttatgagcatccatataactacatacctgagcaaaatccttatttgttattttatgatctcttcttttagtttctacatataatcgattattatttgggagtattaaactaatatctgtacgccccaataaagttgattcttcacaatcaaaccattctttcttgtaacctaataaatgtagcaaatccttaacaaccaacattttgatgttttcctcactccccctcttctctaattcattaagataaaagccttgtaagttttgtaaagttttcaaatcttcattcttcatttgcttaaacctccttatttgtttatcaataatagtttgtataaaattttgattttaattcgtttattttaatggatagtaatccaaatgcttaaataatatatacattttatgaatttaggacaaatattagtcttgttttttcataaaaattcacaataataagcaggatattacattaatttgtagaaataaaatataactggtataaaagtgctggttaatattttatgggaggtattggaaatggctagatttgaaattaaaaagagtagcaatgatcaatattattttgttttaaaagctaacaatggacaggtaattctacaaagtgaaacttatacatcaaaacaaaattgtaataattgcattaaatcgattaaagaaaatgcaccagatgcggaagtagcagacttaacttaataattatcaaataacactatgaaaatataatcatagtgttatttgataattaaaatgaaattaactaatttatataaattggagaggggtgtggaatatgtcgggtaatccttggagtagtgatataagtgaagaaaaagtatgcttaagccctgatgaattcagcataaataatagtgatgattggacatgtgctctagaaaaaaattatgataaagggagtaagtttagtacttttagatgtgataataaagaaaaattattagaaattacaaaggattattggtgctttttgaagttgatacttgatgaaagaaataaatatgaaaaatgtttaggaatattagaatatcgaaatggatacccttttgttaacaataaggaagctagtaattataataattataaagtggaaaattacgtttttattagggaaaatagagatgtaaaaagtacaatgaaattaatttttaattgttttagagataatttgcaggaagagggtatagtgttgaatatattaaacaaggataatatggagttaagagcagaacattttaaaaataaagtggaagggcaattagaaaatatccctttaagaccaataatgataaaagaagttgaaactggaatttatgaattagagacatatataccaattgataaatatactgaatttcaaaatatagttggtaaagaaatagattttgaaatttatcaatatataaaaaatattaaaattaaagtaattgaaagaggcacaggtggtggaacaagtgataaatgggatagtgtaagtattaaatttaagaaagtgaattaaatagattgaataaattatgttgaggtgtacaatgattaatagtgattatttgatcagaaaaaatggaaaatatagtggtgatataaaatgtccaatttgtgaggaaattattgaatggaaagaaaatgaaaatgcagaagttagagtggtattaaaagattgtgcgattgaagaacatatgacaagtggattaaatataggtcggaattacattattcctgcaaaaatatcaaaaacaggagaagtaacttttaaagtatacgtagttgcagaatgtcctaaatgtaaccataaaatagagttttatgaaagagcaaagtatacaagataatatatcaatttaatagaaagaggttaaaagttatgtaagatgaagagttaacagaaaaaaattattatacacaactattaaatgaaaaaagagaattggcagaatatatttagatactaaaaagtttgaatagaaacaagaattttataaaagaataaagccttatataaataacctatcagattctaaattaaaagaagagtatcagagtaatatagaagcaaatgatgaagaactaaaaaatggggaaatactgatgaaaaagagaaattttattgaaagaaaaattggtattggaaagcttcaaaataatattcgtgaaaattaaaaataggattaccacaataaaaactgatagttctttttcgataaagtatatttgagttatttgtaaataaatactatttataggaggataattatgagtattgtagatcataatcaaggggttcaagttccttattccatagaagatacatttatggctcttagacaagcttgtcaaaacttggatggatttaatattaatgactttgatgaaacgttaaaaattttatatttaaaagcaggagtcagtttgttttcgtggggagaaaatattactgttactgtagcatcttgtgacaatggaaattctgaaatatctattttatctacacctaaaactggtgttatgtttgggggtactgtagatatgggtaaaaataggaaaaatataaatactataatgtctgctttatctgaagagttaaaaaactatgttcaagtaacaaaaaaatctacttcaacagaatcagttgcagacgaaattagaaaacttgcagaacttaaagaacaagggatacttactgaagatgaattttcaagtaagaaaaaacaattattaggattgtagaaaaatgataagttgcaagatcaatataagatgatattgatatttatataagttaaaatttaaataaaaaataagagctaaaagtatttagatttagtgactcacataagttggtgagtccttttttgatacttaaattcccgcctaaaagtatcatttcaataccccaccaattcactaaggtataaaaataatacactatattaactactattcttttttatattaattactatatctgttatattaactacaaaatatataaatttaaaaaagaagtagctatctattaattataggtaactacttcttttcggtggattcatttttataatctatattatatttttcgaataataattctaaagcttcatcagtcagttttgattttgcaattctagttttctcacttaattctgataataaattattatagttcaaatttacagtagtagagaaaggttctctatttacaacacgtctatatttagatttttcttccatgttaatcacctcttctttatacttattatactataacttcatgaaacttcatataatttttttgaaaaagtattgacaaaagtttcatgaaacattaatatgtatatataaacttcatgaaacaacattaaacgaaaaggaggtagtaagaaatgaacacatctaaagactttatcaagtttagacaatatgttagaagtttatctttaagtgttaatgagcaatatatgcttgagtatttatttgaatatacaaatgttcaatatatgtatgcctatcccaaattttctgatttgttattagcattttctactacttctaaaaataggataagtagtactataaagaaacttgagaagaaaaaacttttgttcgttgataggtcatttacaaacaatcgctatcatgtagttaacgcagaattatttattcatcaaggtaaacataatgataaaaatggaactgaagcaccattaaatggacaagtagaatttgaactaactcaggaagagaaagaagtaatagatgcaactaatttcactcgaaaccaagctaagagtctgttacagctttgcaataacaaagtagataaacttatatctatgattaaatatgtatctaataaggctaatatatctaataaatttggatatataaaggctctgttagaaagaggtatcaatattgaagatactaagggaaattatcctaaaaaatctatatcatttgtggataactgtagtagcaggaactacacagaagaatggtatcagaatatagaaaatcgcttgctatatggtctttgagaattaaataaaggaggggttcgtatggataaaataaggagttttcgaggtataacagcagaaaaactgattgaagtcttaaaacaagtaccaagtgatacaaagatatgtattgagttacttggagataactttccgattaagcaagttgaagaatgtacttattttgactggagcaatggcgagaaaaaacaggaacacaaaggaatattaataaaataaagaaaggcagtaacgtaaatgctaccaccagtccattttgcaatttttattgtagcttatgttacttctaaaatcaagggggaaaaagaatgagtttgaatttatattcgttaataattaaagcagcaaatgataataatataaacattacattagaagatataggcagaataaataatactatcaacaatttaatcagtagaaagacaaatatccaatggattaaaaataatattgaagttttattataaaaattattttaaggagaggttgttatgggtaaaagatcaataaatgaattaagtgatgtagcaaaaaaaagaaaagagcatagatgggatgacttaacaagccttatagtaatatatggtatcgaatgggaagaagatatggcattttgcaaattagaagattacaaatctggcgaagcatttgacgaagaaaatgcaactaaaattttatatggatttaatgaagatgaaatctggaataatttatttaaggtttcaaatacaaatgattatgatgatttacatagtagatttaaaaatgcaaaatggtgcactcatgagaatttaatgatatttgaattgttggacggagcaaagttctgtgcaatgagattatagtaataggaaaataatagattgaatacatattctttttatgctactatataaatgatttaaaataaattatggtggaggtgaaaagaatatgtatgaatttttaggagaagataccacactagataagttagatgaatttcaaaaaaataaggttcaatggttgcaagacaatgttcaatattcagaaactacaaaaagaacatattgggaaataataaatattaactttcatgattatgaaaaagaacgtaagcgagatttatatgatttcggaaaagatgaaattatttcagtaataaactcaattatatacactagcataaaaacaaatattagtttgattagtatagtatctagctatataaattgggcaatagaacatgaatataaaaaaggtgaaaatccatgtagagatattgataaaacagaaattatgaaaaatcgtgctgaaatagttaagagaaaatatattacattaagagaattttttaaattattaaataacctaaaatgtagtgatatagataaaatgttattggttttagctagatatggggttaaatctcaaagtgttggaactataaaatggaatcaagtggatagggacaatatgattttaaacttagagaataatgctaaattaccaatagatgatagatttcttacatacttagatagagcttataaatgtgaaatgtatgattataagacaagtacattaaattatgttgattacggatatattttaaaagtatcagataaaacagatagtgataagttaggtagggatacgatatacactagagttaatgccatatttaggaataatggaatgcaaaaaatttcgttgacagacttatatcattctagacaatatgattttctatttgatatattaagaaaaaataaagacgtaacatataacgatgtaagaaatgtattaatgatgttttttggagaatctacaccagcaagagcacagtatttaaaagaaagatttacgcttatgagtgattatttacctgatttaataaataatacataaacaatttaaaatatttttaaaatggtattgttattttaaattgtttatgttaatataagtttacaggaatatataggaactgatggcagattatatataaacaatttaaaataaaattatattgtttgtaatctgctaattataaaacctatataaacaatttaaaataaagtttggtgtgaatattacatatttagatgatttgtaatctatatcaacaatttaaaataaaaagttgaaggaggtgttcagtatggaagtaataaaaaatagctaaggcaagtacataaaagatacaccaatatctttaaaatcgtacaagcttaactacttaacttataataggtaatttggttaatatgtatgaaacgattatatcagaaaacaaaaattaaagaaagtttttaggaggaattaaattatggaattaaaaccaacgcaaaaacaagtattaggagtattagtaaagcataaaaatgaatggcttggaacagaagagtatatataacgctaaattcagacaaagagaaagatataataattgaaaaatttctatcccagtcttattcggaagcggattgcattaaagaagtattgtacagaatggcaactcaaggagataatttgaaattaattaatataaatagcaccgataaggtgcaaaaaataacaaatagtaataaaaaggtaaagaactatactaaacctaaaggtaataataaggtgctaaaaggtgctgataatgataaagagttattaaaagacgataatattttggtgaacaatatggagcaaattgaaactgataataccaaaaaggtgcaaattaatgataatagcgataatgaggaattaaataagaatatattagagggattagaccgatatttttaataggagtataagcattatagcttatctcctaacaacttaaaattacaattttataaatatataagacaaagaaagacaaagtcaaacataaaggaggtaacagtataaatggaaaatgttccattagttaaatttgtacgtacacagaagttagcaggatatctaatgttacagggatttaaatttctaagagacgatattgatagaaataatcctaattataaaatatatatattcaaaaaccaagatgggattgaaacagcaatagacaattataaaaaggagtttggtagaaaggggaattaagtttggaagagttagcagtaaaaaagttaagtttgcaggagtgtctagaagatttacaaaatgaaataagacatggaaaaaatagagatttctttagagtttactcaattgaaacttcagggggaaaaacatataacactataaaagcaattaaagatcattacatatttgttcgagataatccatttatcaaagacaaaaaaagacgattcattttcgtaactaaatttatagaagaaggtattgaagttgccaaagaaataaataaagatgaagaagaaaagattgcaatgttttacacaccagataaagctattaaaaatgaaaattgttctagtaactttttcgagtgtgcaaaagcaaatacattaattttaactcatgcaatgtattctatattatgtaatcccaaaaagcaagaacataaagagtatagaaagatatttttaaaatataaaacattaattatagatgaagaaataaatccagtaaaagatagtttatttactttttctcaaggtgatacttactggttgactacactagatagttttacagaacaaaatttatcaaaaaaactttatcaattgatgaaaccattattaactttattaaaagaagattataaaccagaaaaccaacttcatagagttgaatgtgattatgaccgtaaagaggttgataagttatatgaggaactaatgcaaggagttcaaaatattagaaatgaattatttgaagataaatataaatgtggcgaaacaaaatgtcaaaaagaaaatttatttaaattattgaatggaatattacttacatatgattcaattgacgataacatatgcttaatcaatcccaaaaggcaaatattttcatataattataaatttgattatttgatgttaaataataatatttggctagatgcttcggctaatttcaataaaatgtatgaaaatggactatttaaagtaattgattgtccaagagaaattgaccatacaaattctaaattaatatttcataaaattaaaactactacttcaagtaaaaatactgatgaaaattttagaagagatataagtaaatatttaattaaagaatattcagaccaagaaatattaatattatctaaggatgtagaatgtaagcaattagcagaaaaagaagaatatctaaagaattatcctaattttaaatattcaaattttgaagctatgagaggtaaaaatgattggaaagattttaaagtgtgttgttatatacatacttatagatggacaagtgcatattacatattcctttatgaatattttaatgatgttattcttccagacaatgatttaataacttcaaatagaaaatttgtattcaagagcaaaaaaagtaaaagcgaatggggatttgagaaagaagagctaaatgaaattatgctttcagatatgtctagttcaatgtatcaaggattaaaaagagttcaaagaaataaacaaccaaaagcaatatttgatgtatttaccgatagcatcaatacaataatgacagtaaaaaaacagctatatggaatagaaactaagaaaaatttcatcatagctgataagggaaaacaaaccgatgcagataaactcaaagaatatataaaagaacattttgaagagaatgaagataaatggataaaagttaagtcaagtgatgttatggagcaattagaaataggtaaaagtaattggtcaaaattatggtcaaaagatgaactatttaaacaatattcaaaagataaaagactaaaacaatctcaattaaaaaatgatgatggaagtaataaaaaaatcaattggataattaaatattagtacctttatagccttaaaacatagtcataccaatggattaagtataagttggtttacttttctttatatatattatatataggttagtatatatgtgtttcgtaagaatggcttaacggtgagtattacaagttcaaaaaggtcaataaaaatagcttaaaaacctgtcaatcgttgaaaatacaaggctgaacgataacgagttgaaaagaataattatttggaggcaaccgttgccgacaacaagcgtatatagctaaacataaaaggagttacgaggctgggagcgagtaacgactatttatgttctatgtacaagactaattaatgcaagggaaattgtactctacgaggtttagtcacaagtaaaaaatatttataagtctgttcacctaaaggttcacgatagacttattgcatattgtttcacttgttcctcgattgtgccttacgtcacaatacgaaattgatttttaaattgtaaaataaagaaagaaggaataaataacatgaattatagaatgacaaaattaaaattaagtgattttaaaatagaaacagaaaagacaggaaaaataattgaaacagaaaatggagaaaaggcattagaaatagtacatataaaaaatgaaaaaggtacaagtgttccaaaacttatatatacttggagtaattatccaaagataagaagtgctttaaatagtaaacttaatgctatgaaaattgaattgcaaaaatcaatagaagaaattgacacaaatttaactgaggaagaaagaaaagaattaattaagagtaaaaagaaagaatttaataacaatcttagaaatgcatttgagaattgtaaagaaaaaaatcataattcatataaggtaattgttagagatactgaattaataagaattattagagcattaaatcttaaaaacaatgatactgaagaaaatggttatacatatataaaagatttgatttgtgtatctgtttcagttccaatgtataaacaaattgaaaaagatggagtaataaaagttaatcatgttagatttaaaaggattttggctagtagtgggaatgtaagaaataagaaagtaatcttcattaatgaaaaactgtatgatagtgcaatgactattctgctatgtggacttcctaaagatatggagcatgaacaagtttcaaaatataatgcctatattggactagttaatagtgatacaattccagtatcaactccaagaatgattgtaatagatgattttacaacaaaaattcctgaaacttttgatgtagtaatcaaagataaaaataaaaaatttagtgtaattccagatcaagagaaagaatttaaattaatgccttttgatggagcgggaattgttgatttagaagttgctaagatttggtcaaaagaattaaatgatatattaaggaaagaaacaaatagaaataaagtaaattatataccttcaagttttcagtttagagcaatcataggagttaaaggaaacttatatacatttgatttgaaaaaatatgcattatctttagatgaagacaaaaggtatataaaagatgtttggggaaaagaacataaaatacttgatgataaggataatttattaatagatgctatactaacaaaatctcaatttaaatttaaaaagaaatatgatagttttgataagtggcaaactgaatttgataaagaagtggaactaaaagacctagataataatgatattaaatacaaaagaacatttaatattgccaagtggggaaataaaaagaacaaggataaagcattattatcatatcagccgattcaatcattagaattaactcaagaacaaattgaaattctatgtaaaccaacagttgaaattattaaaaatatttctacagatgtggacgagttcttaaaatacagaggattattagaggaaacatatgatgaaaatggagaactagttttaaaagaaactgatatggatagagtaccaaagtattatgaagccttaaagaaaaataaaaatctattttatgatagttacattcaaaagaaagtccaaaaagatattaatagatttaaagaaaatgcaatgaaaggtatggtttttgtagatggaaatttccaaacgatgtcaccagatataatagcatttatggaatatgctactggacagtcagtgaaaggagtagttcctaaaaacaatatttatagtaactattggagaaataaagaatatataagctatgaaaaaaatgaagcaggggaagaagtgaaaaaaatagaaaaagtaacagcagttgatattataagatttcctcatgtttcaaatgagcatatttttgccacagttatgcaaaatgaaattgaagaatttcaatatattcaagatggaataataatgtcaatatatgatacttcacttgaaaggctcggtaatggggatgaagatggtgatagaatcctcacaataccaaacgttggggcagaaaataaaataatagttgataatgctaaagaacaacaaactaataccatatactttatcaatgaatacgaaaaagataaaaaagaaaaagaagaaaaacttatagctgaaggtaaaatggaaagacctaaaccaattaaaataaatcagatagacgaattaattaaatgtgatgcaaatggaatggaagcgtcaataggtaaggttgtaaataagataagtattctatggtcgctaccgaagacaaaagaaagagataattatattaaaataatgagtgttataggttcattaacaatcgattatgtaaaaacaggagtattagagcctattccaaaagaaattgaagaattccttgaaaataaaaaggaagttgatggtaaagagtttaaagatagttacaaaaagccaatatttttaaaagtgaaatataaaaagcttgagcgtgatgaaaagaggataaataaaaaccacaaactatttgatgataatataacggaggaattattttctgacacagattgcactatgaatagactttatcatcatatagaatcagaattaaataaaataaatcttgataagcctaaaggagattttgattttactacattaataaaagataaagctaatgtgagaaatgaaacatatccaaaggttaaggaaaaattaattgaattaaaaaaagaacatgatgatcttactcaagaaaattctatagatatagaaaattattcatatgatagtgataagaaagtggagcagtatgatagatttaaatatttctatagatattgtaaaaatgaattagcttcaataaataaagaaactcagaaaaaagataagttaattgattatttagtatatgcattttattgtgacaaggattttgcattaaagaatgaagctaaagaccttttatggaatgtatttggtgcagaattaaacactagaataaataataagtcttataatgataaagaatttgatgttattgagttggaagataaaagaaaagaactactaattgagaaaaaagagaaagcaaaaaataatgcaaagaaaattaaaattgaaggaatagatactttagaagataaagataaaaagaaaattgaatttcataaacaaaatacatttaaaaatatagatgaaatgggtttatcaaaacaagctaataaggtactgaaggttttaataatgttagatttattatttaatcaatacaataaaaaattattaataggtcagtcaagtaaaaaaaccataactagagccactatttctaaatttacaggtattaatggaataaaaatagacgaatatttaaaagaattaatatcaaaagaattaatagaactaacaactaaaagtgataagataacgctggaatgtaatataaatgttagtgtatcaaatacaggaaatgcagtgaaactaagggatagtgagagtatattaaaacagcttaaaaaataaccttgcaaaaaatacaaaaaaaaattgacaagctatactgtttgtgatagtcaaaataataaaaatgtaaagaaaaataaaggaaatttgactatcacttaccattgtaaatgaaaatttatgtaaaaaataattattaatataggaagaagaatattaagttaattaaaattaaataaaatataaagaaagggtgataacgcatgaaacaagacattataagggaagacttgaaaagctatctcaaagaaaatggaataaaagcaaagtttattgctgaaaaaataggaatcagtcctgctatgataagctactttataaatcataagaaaaagttatcatcggctagtttgattttaatttctaacattatatataattaatttttttgtttttgtaaaatggtattatacatcaattttataataccattgaatagaatgcaaagtcaatatgttttggaaaaataattaaaaaattatagttttaatggagtatgctaattactccaatgttatattcataattttaaatttcaagctttctttataattagtttgtaaattgaattaacaaactttcatttaattgggtaagctaattttcctcagttagcttattctattaagactataatgtatacaacataaacatagtaaatacaatatgtttacatatatacaaaaataaaaataagaaagaggtaagagacatgatggaaacaaataaagcattgactaaaagagattatataataataaaaaagtatttgttagaaaatgaatttaatattgatacatttaaacgtgaatatccagatataaaagtccctaatattagggcgggagaattccagaatattatatttgtgaatggatatttatttccaattgaattttattataatagaaacttttttcaaatttcagatacgaaaacttttaaacttgatctagagaaaaaacaatttataaaagttactcagttctctgaaatatatatagactttataaatgctatagaaaaaaatgctattgaattttctaaaatagatgaagataaaagcttagaagatttagaagatttgctggatgaaaaattacatatgactttattaattgatagaaaagataaagtaagcgaacttgttgaaggtttttcaaaagcattgaaaagttctgaattagaagagattcacgaagatatgaaaaaaactattaaaaatttaaaaccatttttagataagttttattattatgcagtagatatggaaaattctcgtttaggacaaggctatataatagtagattcaaaaaataattttatagaatttattagaacaatttaattataagctgttaaaggtcatattaaatatggtttttttagagtttatatttttaaactcctatattcatgttattttttactcactttatttatttgtaaagtattgtatcaaatctaaccatactttgtttgaaaatatggttaacatataaagaaaccttgttggtgtcaatgtgggtgcatagtcccaccgtcctcaaataaatgaagaaccaactattgcaaaggaaatatttcctcttttaagaccataatattatggttaagattgtggcaattaagtcttagagatagacaataaatatctctatatttatacaaccatttatagaatcattaagcctttaaatagtataaaagctttctctctctgcttattctcccttatttaataagcttgaagatataataaatggttatataagtatgtataaaaatacctacttaaaagcgaaaataaggctcatttagagcttttaaatttagatatataaatactaggggatggtcactttgaacttaaattgagggcaatttaggtcataaactaaataataaggaggaacaattaatggaattatcagaactaaatttaaatgaggaacaattaacaggggtaaatgaatatttagaaagtcaaattcaagcaaaattgcaaagcgaaggagataaaattagaactaaatataataataaaataaaagaatatgaaactaaaatcggtgaatatgatattacaattaaggatttacaaagtaaagtacctgtagaaaaatcgccagaacaaattgaaaatgataaaagaataaaagctttagaagacaaggctaaagaggtagataaaaaggaaaaaatgcttgatctacaagaaaaattatctagtaagggtttaaataagcaacttcataaatttttaaatgttgaaggggtagaagattttgaaacttatttaggtgaattagttgaagctataggtaaacaatctactagcacatatcaacctaaaaagcatgtagatactgccaactcaaatataactaaagcagattttcaaaagatgaattatcaacaaagaacagaattatatagttctaatccagacctgtataaattactatctaaataggaggtagcttatgcaaagatataatggacaattgtttgcagatgctcaattcactaacgtaaacttagatgtggaatttggtgaagatgaaactgaaatagatgtcatgccacttttgcttaaaaatggttttgattatttatggaaagtaagggttatgtcttatggtagtgtaaaatacctaataaatggaatagaatatgaacgaaatggatgtttatatttggatgaggtattagttgaaacatttaagatattaaaacttgaaggagcaactaataacaaagtaactttaaatttagaatattgtttataaagaagtcgctaattaattttagtggctttttttattataaaaatttaacaacaggaaggaatgatttttaatggctcaagtaacaatagtacctgacgtatactcaactatggtaactgaaaaagtaaaaggtatgattaaaatatcaacactagcaaaggatttaggtgatttaagtgggaatgtaggagatactttacaatttccaatgttcaaggctttatctgatgctgaactaatgaaaaaaggagtagcaattacaccagaagaattatctcaaacttcaagtggtaaaaagattgttcaatatggtaaaggtgtaagagtttatgacatggattcattaacagcacttggtaatttcgttgaaaatggaatttctcaacaagctagaatcatggctcatgctcaagataatgaaatggttaaagatattgatgctaatgcaattttaaaagttgctactgcacaaccaaaagccataactgatgatgaattaatggcaggtttccaaatgttcggagatgaacaagataatgtggatttcgctggtatcgttgtaaattcactattagcaccaagtttttacaaaatggaatcatttgtgaaatctacttcaactacagctacagcacaaaatggacgagttgtaaatggttgtatcggtttttataggggtacaattccagtaatgttatctgatgtaaatacatttgattcaacattaggtgaatgtaaatcttatataatcaaaaatgatgcattaggtattatgcctaagagagacattcttgttgaaccagatagaaagccagattttaaagctacagatgtttacgctgactacatatttgcatgtggtttaataatgaaagatggagtttgcatattaagaaaaactattgcttaattttttaagtgagattgaatgttgatttcattaaatgggaagttggggagcaattttgtgtccctaatttctcatttttttacttacctaaagtaataacaattttaataaaaataaggaggtttaacaaaaatgactattagagaacgtataagaatgaccagagcaatctataacattactcaaaaagatgttgcagattatttaggactttcaaaacaatatattacgcaaatagaaacaaacaaacttactgcaacggatgaaagaatggagcaaattttaaatgctgtctatagcgttggagaattgaaaaaacaaggcagattaaaagaagttcttgaagaattaaaaaaggctaatgaaaataataaaaccaaaacagaatagaggtgatttatatggcaaaagaaaaaagaagtcctcaaagtaatttaaataaaaatttagaatctatgttaagtaattcaaagcttagacattttgtaagatggtttacagatggacaagatgaaagtaagtgggaacaattatctaaaaattattttaataatatttcattagataaagctaaagaattatatttagaaaaaaaagatgtgcaggatgctatattatatgttactaagtttcaaaaggatttaaatttagttaaaatatataactccatgatgaaaaaagcaatagaaggtgatactaatgctgccacttggataattaaattttctgaaagtgatttctttgataataaagaagataagctaaagaaattaacaagtagattaaaattaaattttgaggataataacaatgaatgatgaagaaaaattcttaaaggtttggaatgatcctgcgttattttcttataatttcatggaaattcaagataaaaatgatgaattagtaccttttaaatttaataaattgcaaagagatttcatggagaatatgtcaagatacaatataattcttaaatcaagacagcttggtttttctgttatgatttgtgcatatgctatatggttggcgataacaactcctaactcaaattgtttaatgctttcatataatgatgaatcaaaaagagcaatatttaataagttaaaacagatatacaaaagtattccagaggaagttaaaccaaagttgttaagaaataatagaagtgaattacaaatggaaaatggttcaattatttcatgttcacctatgggaaatgttgataaaggaaggggtaacacctgttcattaatttggatttctgaatttgcttttgttaaatcagatgtggcagaaaaacaaattttatcattggagcaagctttaaatagtaagggtaaattaataattgagactacagctaacggacttaacttttttcatggcatgtacataaaatctaaaagaaaagaaaatttttataaatcatttttctataattatttggatggtaaagaaatgtttttagagcaatatgaggaagctagagacacatggaagaacttacataataatgttccatttagtgagaaagatttaaaagatgatgaaaaggaattattaaagaattatcctaatatgacattggatgtattgtgttggcgtagattaaaaattgaaaatagttctgaagataaattcaatcaagaatatccaatcagtgatgatgttgcgtttatcagcacaggggcaagtgtatttgataataagagagtaagtacagtattacaaagtatattactaaataaaactaaatatttgaagaaattagaaattgaagatttgccacaagaattagaaaaattctatggacgatctttttttatgtacaaaagtccaactccaaaagccaaatattatataggtgtagatacagcagaaggaacaaaaaaggattcaagtacctgtattgttttagctgaagaaggagaagaagttgcaatgtttaaaaataatgcaattaaaccttggcagttcgctgaatttgtaaatatcttaggaagatattataacaaagcctatcttgttgtagaaaaaatgagtggggggcatagtgtaattgaaagattgagatatgaaaaacaatatttaaatatgcacaaatataaatcatatgatgaatttaatagaattgtatataatattgggtttgatacaaaaagtaaaactaaatcattagtcataaatgacctaagagaaatgtttgaaaaaggacaattattacttcattcggcagaaattttagaagaaatgaaagtatttgaaattagtgacaatggaagtatgggagcgatgtctggctatcacgatgacctagttatggcacttgcactagcaatagtaggattaaaaagtcatatatattatgcatggtaaattataatttaaaattaaaggagagaaatataatggtacaagattattattcattaataaaaagaattagagcaatgagaagggattatccaaatttaacaatagaacaaaaaaatttattgatgaatatggaattaaagattgaagctaaatatataaaacctaatgaatgtcacactaaatctgagaaaaagaaattaaaacaaaagattaatgaaatcagaagacacaatgctaaaaatcatatagaaaataaataaattttaatataatcatatataaaaacacttaaacaggtgtttatttttttacctaaaattaactgcaaaaattaagtggacatatatggaggatagaaaggaagataatagaaatggaaataacaatagaaaaaatagaagcaagaaaagaatatatgaaaggttatagagaagaaaatagagaaaaattaaatgcttatagcagggaatattataagaataataaagagtattacaaaaattactataaaaattattatcgagaaaataaggagcgtatacttttaaatcataaattatggatagaacaaaaagcaattgatagtgtttattgttttagaaatattgatggaagtgtactgtattggggaagttcgtcaagatttcaagaaagaatctcagcacattgtaccaaaaattcacatttaaaaatgagtgctgaagaaatggtttctgagtggtttttagataaaattgaatatcagaactatgctgaatacaatatttcaagagatgatttgtattacatagaaagttatcataaaaacaaagaaaaggaaatattaaaaacggctgaagttcattacaatgaagataaacttactaggagcaaagaagatttagagaccttggcaaatagtgtagagtttgttgaatttgataagttagaaaaatatttaaattaatttttatatacctgaatagaattatgtattaaatctcaataatattataaatctgtctatttggaaagtcaatattaaataataaaaaaatagtattaaggagagattttgatatgaaaaaagaatgtaatgtaattggaataaaaaatggtgagaaatttaaatttaggtttatgtttgatgaatcagattatttagaaaagttatgtgaggaacttacttcacgtgatgtaatgttagaagatgtatttaaattatgtataaattaaaagaactaggaggattagaatatgcaagtaatactaagcgaaaaagaatataaagaaatggaaggaaaaataaaaatactaaaccattatgcagacttatttcataaggtacaggacaaattacaagaagcttttttagttacaatgcaaggctatgaaaataaagaccttaaagcattagatataaaaattgatatggacaaacttaaagaaatagctgtcaattatggattcaataaagatcagcaagaagctattcgtaaatatataaatgaaaataattaaaataaaacaatttttgtaggatgatgtttggcattgtcctaatttaaatttaggaaaggagagaaagacaatgaatgaatttaatgatgaatatactcgtagtgttggaaagtcagcacttagaaggacatggattcgtgtagatttactaaatgataactatataaaattagattcattagaatgtgatattatttctggttctataacaattcaaaatgcattagatagtgatttagctagaagaaaaggcaatttagtattagctagtaggaaagatttgaatgaagacttttacaaaattactttaaaaaattgtgttcaaatatatataggtattgaaaatattgctttaaaacaacaatatgaatttaatatgggaatatatttacttaattcccctaacacaaaaatcagtgtatctgagagaactattacactagatttatgtgatttaattgaaaactatagtagattttcaaatggattagttggaaaattatcatttggtgctgatgcaaatttagcagaaactatattaaacatagctactaatagtaatttaatgggattaagttcagataaaacattaattgaatcctgtgattctttaattgattcggcacaaacatttgaacaagatacggatttagtagatgttttaaagaaattaatatctttgcatccaatatatgattgctactttaataatggtggatattttgtttttgaactaattaaacaaagagcaactgattcagctatagattatatagataatgattttccgtcattaatatctattgattataaaaagaattgggaaaatgtgcgtaatgatattattgtaaatggtgcaatgataagtaatgatgatggaactacaactcaagcaaaatatgaattaagaaatgagacaggcaatgaattatctatagataaattaggattacatagaaaagtaattagtaatgataataacaaaactgatgctatgtgtcaaagtgaagctatttactggatggataaatattctaattttgctgagactttaacattgcaaatgatacctgcaccttacttagttccaaacaaggttatagaagtcaatttagaatatgaagatataataattactggacgatggttaattgattctatttccatagatttgaaatttgatggacttcaaactgtaacgtgtcataagctctatggtcaagctgtacataatttagatggtagtttattttctgatactaggtctggaatagtggctgatggtggctcatttactagtacacaaactaacaatgtatatgatggtggaagttattaaaaataataaaagaggagagatataagtgttagatagagaaaatttaaaaaaagaattaatggttagatataaagaggaaaaatcgattccttgtaatataaatatttctacttgtggttttaataatgatgaaattttagttgcatttgatactatgaattattcatttattgaacgtttcaaagatgatatttcactaaaagatatgtgtgagattttagataattcaatttataaatgtgactataaatatgcttattttgaattgaaaaaattttgggaagaacactctatcaataaagaattatttaaacagggttttgaattagcatgtggggaagaactattatttgaaataaaagaagatgaaatgttggttaatataggtgattgcttatttacagttaacttatttgatgatgaattatattataaaataaataacttttatcatattaaaataggttacaagcataccgtaacttttgaaaagtatgatgaagataaatttaatatatcagttcacaatgaaatagagcaaggtgtaaagcaactacaaataaataggaaaaaagctaaaaaagaactagatgaaaagagaaataatctagttctttctgtttgcaataaacttttagaaatcaaaaataacttagaaagtataggaataaaggagagataattaatggttaaaatacaaaacaattatattaaaacaaaagtaagaggacactttggagatattgaagtatacaattctcaagtaaataaaaatgtacatagtcaattagtagatatgattaaaaataattcacaaagcattgatcttgagaatggaatgtctgatattcaaataaataataccattccaattatgcgttttatgcttataaatttatcaaatgttgaaactgctgaatactggaatagtgtaagtgatattgatttagaagatatgcttaatttagcagatggagactttaaacaagcagttaattcattattggacatgctgcttgaaattacacaagatataagaattcaagagattagaaaattaaatatattaaaaaacaaattaaatgaattaacagagatatttaaattcaatactgatatagatatgaagttaaaagaatttggacttgatagagaattattaattaaaattcaaaatggtgataaagaagctattgaaaagtttcaaaaagcattatttgaaaataataagaaaactagaaaaccaagaactaaaaaaaataaataataagaaaactatgagagagtaatattttatttattgctctcttttttgttgtctagaaaggagatgcagtaaataaaatggcaggacaatttaaaaactcaatacaattagggattcaattacctaaacaaagtgacgtacaaggtcaattaaatagtgttgttaaatcattaaataatactaaaataaatctagatgtaaatattgctaattctaatgtagccaaacaattagagacattaacaactttagctaataattttaaatctagtataggtgaaaatatttctttaggagatattgataaagctataagccaaactgtaactaatgttcaaaaaatgaatacagaattaaagaataattctacaattagtaatgataagaggttacaagaactacaaaaagaaattgatttaagtaataaattagttgaagcagaccaaaaaagacagactaaagatgattcagccaatttaaaagctattgaacaggaaaatgaattattagcaaaacaagcagacgcatataaacagattgatgtaatgaaagctaatggaatagttagtaatgatgatatatcaaaacttgaatcaatggtgcaaaaatctaattcattaaaggatatgaataaagctttaaattctataatgactacatcaatgatgaaagaatcatctattgttacattatcaaaacaattagacgatgctcaagtaaaattagataaaatgaaatccacttttggtaataagttaccagatggatttattcaatcaactgaaagtcaaataaataaattaagagaagacttaactaaagttgatggtatgaatttcaatggtattaaaaacagcttaaatgatattaatactggaatgaaagttacaaataatgaaactagagaattagtaaactcattaaaagaaactgatggttctttcttttctggaatttcggattttctcggaaaagcaggaatttttgttggggttgctacagtagttcaagaaactgtttctagtataaaagaaggaatttcaacagttattgatatggacacagctttaggtaatttgaataaggttgtcacaatgagtaaagatcaattgaatcaaatgcgtgatagtgctgttcaaatgggtaaggagttgggacgttcatcaatagaagttgctaattctcaggctgaatttggtaggttatataaaactcaagaagaaataaacgacatgactaaagcatctataataggtgctaatgttatggatggaacaacagcagaccaagttgccaagtctttaactactataattacatctatgaaaatggaagctaaagattcaatgactatattagattctatgaatgaaattcaaaataactatagggtttcagcatcgacactttctgaagcattagcacaagtagggagtacagcttatacaagtggtgctaacttacaacaagtagaaggttatataacttcaattgctacagctacaggaaaagaaggttctgagataggaaattcattaaaatctatgatgtcaagaatctacaaaattggtgaagagggcatggaatcagaggggcgtcccgaaaagatgttacaatcaatgggagttgccgtaagagattcagaggggaattttaaaagctttagtgatatactttcatcactttcagttaaatggaaagacatgagtgacactcagaaaatagctactgctcagattgttgcaggtcaaaatcgttataatgactttatggccttgatgaataattatgatacagcagttaattcaaccactactgcgttgaactcacagggatcagccctcaaggagaattctatacatatgcaaacagccgaggcgaagcttggcacattaaaagctactactgaagaattagcatataaaatgattaattcggacggcattaaatcgatgatagacggattaacttctttagtatcagctttagaaactgtagatggaaaaactatagcttttactgccactattggtggattagttttagtaatgtcaaaattgtcagcattgaataaaactttaatagcaggtgaagctgtaactggattatctagatttattgctgtattgtctggtatgcaaactacagcaacaactattaatggagtaacaaatgcaacaaaagcattacaactagctcaggtaggtttgatcgcggaaacagaaggattaacagggttaaaaggagcatggttgttattaagtactggaataaaagaagctataactagttctttggcatttatggcaactcctttagggcttgctatttcagctattgctgtggctgtaggaattgctgtaactgcatttacaagttataaagaacatcaagcacaattagaacaacaatcaaagaacttaaaggatgctattgatggagtcaatgaaagtcttaaaaatggagatacaaaaggtgctagcaagcaattggataaagctaaagaagagcaggaacaattacaaaagctttatgaaactagaaaaaaattagagggaatgtctgaagaccaattttatagtaaaatgggtggagcagataaagcacaatcaattgctttagttcaacatcaaatcgacgaattaacaaattctataaaggaaaatggattaacagttaatgaagaaactggaactattaaggaatatgttgaagcacaagaagaggtcgcgaatgctaaaatagtagacaatgttaaagaacagactaaatcacaattagaaaacagagaaaacctagaaaaagcaaaagaagaatataccacttttataggtactgttcaagggttatatacagaatatcagactttatcagatcaagagagtttaagtgctgatcaaaagacacgtttaagtgaagtgtgttcagatctacaatctaaattcacagatttaaatgttagtgttgatgaaaatggtgttgcacatataaataataccccacttatagaagacaatatttcttatctaactagcgagggaatgactattgagactctaactagcatacgtcttagtgataagaaagcttgtagtgaatggtctattggcaatcagcaaatgacttatcaagaagtttctaacaatatagaaaattataaggctgaaattgatgctattggaaagttaatggaagctagaagtcaaagtgctcaaagctctacagcttcaggaacaataactgattctgcaattgatgcaactttacaagttactaaatctggcttggaagctgatgctagtgaattagaaagtgctaaatctaaaatagattcaatatatggatctataaaagctcctgttaataatgcacatactgttggtggaattgatatgtctgattacggaggaggaaacagtaaaaaaggtagttcaggaaaatctgatgcagaaaaagaagctgaaaaggctgaaaaacttgctgaagaaataaacaaattacaagctgatattaagccagatcgttatttagaattaaatggtgctataaaagatataaataatcaacttgaagctaataaaactttacaagaggctacaactggagaagaacattcaagagctattgaacaagagattgatttatataatcagaagaaagttgctttagctaatttaaatgctgagcaacaaaaagaagcacaggaattaaaagataaattatctcaatattcttttcaatttgatgccaatggaaaattaataaattcagaacaaagacttttagagttacaaaaatctattaatgctgaaacaggagacaccgaggaagcaaaacagaaaaaagaagatgatattaaatggttaaaggatttacaagaccaaactaaaagttatattgatttagttgaagataaaattccagatgttacaaatcaatggaatgaattagataatactattaagaaagtagatgaagaccaacttagaaagtatttagagacagaacagaaaactaaagaaatagaattagaggttaaacaaaaatcagaaactaacgatttaaccaagaaaatatacaatgtttcagaggacgattataacgattatactcaaagtaaaaaagattcattagaacaagaaatatctgatttacaagatcgtgttgatgccgatgaagatgatttttctgctaaagatgctcttaaagttaagcaacaggaattaaatgatgttgaaaaggaatcttacgataatataaaagattttcaatcagtttatgaagatattcataatcaaagaatggaagctattcaagatgagttagatgcacttgaaaaagaacatgatgaacaacaaaatgaaaatgacttgttggaaaagaaaaaggctcttactgaagcacaaaatgcacttgataaagctaaagaggataaaacagtttatacatattccaaaaatgctgatggtgtttgggattttacatggcagtcagacacagaagctattaagtcagcacaatcaacttatgatgatgctaaaaagagttatgatgatactgttgcagaccaggcatatgaagctgaaaaagcagtcttagaacaacaattaactgatgaacaaaccattcttgatactaaacagaaaatgtatgataagcaattgaaagctttggaaacagaacagcaaagtgaaaaagataaatttgaatatcattattctgacatggataagttagtagaacaagaaatgaaagacttaaatcaaaagtacggtgataattggaaattgatttatgatacaatagataagaacttaacagatgttgaaaagagatatgatagcctaagtagtttaaaagcttcaataggcattgatggaatggcttcagattcaactacaagttcaagcactacaaccgatgatgatggaaatgttattagtagttcaaatggttcaagtagtagtggtactgatatattaaatgtaaatgaaactaagatgaaagagcaattacaaaaatatgctgatgctttacaagaaaaattaaatactatgaataagtatgctactaagatgattgattctaaagcaaatcttgaaagtagtattttaagtattcaagataaatctcaggatgcacaatataatagtttaacttcatttgctattaaatatactacttttacagataagttcttagaaatgttacaattgatttatgactttagatatacaaatatagtaaatttaactacacaaatgcaagatttaattaaatcagcattattaagttgtgaggaagcttatcaagattttgttgaaatgtctgaagcaatgggaattgatgttaaagattctgttagtattaattctgcattatctcaattcaatcaatataaagaaagtgtagctgattggactaagacaaaagaaggtatgtattcaactcctttagctgattatgttaatgattctgatgcacttaaatattataataataatatttcatcttatctttcagatgaggtattgtctaaaattaatactataagtttacctaatagttactcaaaatcaatttcaaatggctatggaactttagtaaataataaggctacatcaattaatacctattataacattgataatatagaaatgactgcttcaacagatgatccaactcagacatttaacaatataataaactatgtaaatcaaaaagcatcactaaaaagtagtaattaaatttattagacttaggaatatttttattcttaagtctttttgttttatttaaggaggttgaataaaatgtctaataattataaatttcaggataaagaatattcatcaaatttatttttagaagctatggaaacagtagcgacaagagtagctaagagtttatttgttttaaattgttatactgaagggattattaaagcagtattaacagaaaataaatatacggttcaattaacgaatggtgaactatatgatttacctgcaagacaaggtttaactttagcagtaaataatatagttttagtggttcaggtaaatggagatataaataaaagatttatagattgtataagaccatattaaatgagtaaacaaataaaagctagtaattacaacgcgtttacgctgatttattagtatacaaaataataaaattaatagaaaaaaggagcgatatatataatgatggatattaattattacataaaaacagcatataatgataatcctttatggtttatgagagaggtggaaaaaccacatcatataatgagaatagcgaagtgttttagacttaaaaattatttacatgggaaacatgaggtattgaatagacaagatactgtatacaaaaatcaaaagtttacagtccgaaaaatagtattacataatacaaaaactattttaaattttcattcaaactatttacttggaaaaccagtaactttagcaggtactgaaagtttagtatcggatattcaatccgtatataattacggaaactataattctattgattgggagttaatggataaggtaggtaaatacggagatagctttgaatttatttatatagatgataatggaaatattacatctaaagtatttgatagttcatgttcttatcctgtttttgctgacgatggaacatatattgcatttatagagcattggactaataaagaaaatataagttattggaatgtatattatccagatagagttgaggaatggagcaatgaaggttctagtccgtatagtaaaccagataagaatacaggaaaagatgtagtttattatgacccacatatgttaagtagtacagaaaatagcacaggcttaccaatacattattataatcctagtgattgggactttcgagaaggcgaaggtttattagaattaattcaacctattatggatgaactagaagatatttatagtaaaatgggagatagtatttataccttatctttaaatcctttattagtatcaacaggacaaccattccaaggtgctatcaagaataatgatgctgtaggttatatgtttaatatggaattgggtggagaattaaaatatgtagcaagtacaatggattctaattctattaaattatatttaaatgaaatacagaatcaattaaactttaatgcatatatgcctagtatattagggggtaatactaatatagctaatgttagtgaagtatcgttgcgtatgctttatcaattggctgatgtttatgcgatgcttaatgaaagagtaatgaggaatggatttaatgaaagatttaatgtcattagaaagttattaggtagggaagttaagggagaatatattaatgtagaatttaattatgcacgtcctcaaaacgttactgagacattagacaatattcaaaagcaagtagaaatgggagcaatgtccattgaaacagcagttgagaagtcaccattgacaccagataaaacacaagagttagagagacttaaaaaggataataaaggtaagacagataatagcaatatagatactaatgtagtgaataatgatacagtaacagagtaggtaagtagtacatagtatggttgtatgatatgatatagtgtataagtatgtagtataattgtatattatttataaatgtatgatgtagtaaaagccttgatatataaaggtttatgcgttgtatatatgtgtgatgatatgatggttatattaggtactaacactattgtgtcatgtgtcatatagtagtataatgagggtatgtgatatagggtaataagatatgattattatgttttatgttagcgtttttctttacacacaaaaataatattatatattagaaaaaaagttcaaaaaatgaacgatatgttcaacaactaaacgagttcgaaatgtgaacagatacgcacacgtgttcttgttggcataaatgttcgtacaaattatggtgatattccaccaatataacagtatattaacgagaaataattgggaaataataaatgtttatttatgcaacaattatgtataatatacagaatgtacactattttatgcataaacttaataaaatctatcaatacttttatgcaatagcattatatgctagatgtactgtcatagttcgtattctatagattatacgaactcgataaaacttgggaaataaatcttgtaattttattattacaggctcttttttgggctataaatcgactgaaatgagtacaaatgtctgttatcccttccggaaaaatggtcgcacatctaataaaaaaaccacccccagaaaaaatgtaactaaatgtaattaattatatttaaatagaaaattatgctataattaattatatatgttagaaattaaaggggataattacatgaatgatacattgaaaaatattataacaagtcttggaacaagtttgattgttagttcagtaacttttactcttggtttaaaatcagggaaaaatcaatctgatcgccaaatccttagaaataaatatagggacataagtgtacatttttctaatttactggatggaattaatagcacaagacctaaaaaatgggcagattttaaaattattaggaatgcatcaaggcaagaaagctatcctcttatgaaagaaatgagatttgatggacaatcgattgaacttaaacaaaaaattgttagcacaagcgaagatttagaacttagattaatgagatactctgataaatatagtaagaaattaaagataatacaagaatatactatcagtgagttagaaaatcattgtagtaatctaattaaacatgaaaactatgagatatgtacaactaaagatagtaataataagcgttatagagaatataattatggaatctttattattggtgatgaattaaaaaatgcaatacaggacttaaaagaagataatattcaaggtattcgattcacaattaatatagaatataacaaaattcaaactttatctatttttaaaaatacactagacgatattttaattgaagaattcttagataatattaagaaatattctgaagcaaatcaaaatattattgatttattacaagaaagagaaaatttaataattgagactaagaatcttataaaagatattaataaaagagtaaaagaaccaattacatttatagaaacaatagttggggctataacagatatattcaaagtataataaaaaaagtatatataggatgaaaaataatatgaaagattttattaacgaatataaaggaattattggaactattataggtacattattgggatttggattgggtttagtaaaagattatttcaagaatagaggaaagatatactatgatttttcaaaatttgagttaaaatatgagagtacaagtgaatatggatttacattttatgataaagagataaataatttagaaaatgtacatggagctatattttccttaaatctaaaaataactaatgcatcaagtggaattaagatattgaaaaatattataataagatttacatctgatgatgatgaatttgaaaatgtaccacaagtatttagtcatagccatataatagcaggcaaatttaatgagtataaagagttaaccttattaaatctaaatccatatgaaacgcaagaaatagatttaaatatttttattaataaagaaaatataaataaagaaatagaatttcaaaatatatattttgaagctaaagatattaaaaacagaaatattaaagttaaaattaaataagaaatattagattaggaggattatcgatgtttttgataatctttttttattaccttctcaaatacgaactttacttctttacaaatacgaactattagattataataagagttgtaaaagatattgaagatatttgagaggggaaattaaaatggcaaataaaaaaacattagcattatcaaatgaacaatattcaaaaataatagaagctatagtaaacggatttgagtttgaaggaaaacaaatacaacctaactcaaggattgcaacagctttagttattgaagcaaatcttggaataagaatcggggacgttcttaatttacgtttaactgatataattaaagatggtcaaagatttagattagatgtaattgaggataaaacagaaaaaactagaacttttacagtaccagaagttatttttaatttcattaaagaatattgtattaaaaatgaaataaaagaaactgctaaaatatttcaacttggagaaagagcagttcaaaagcaattgaaaataacttgtgatttcttaggatataaaggaataagcactcatagttttagaaaatattttgctactaatatatatatcaataataattacaatatcgaattagtaagacagttattacaacatagtgtggtagaaacaagtcaaaaatatattgggattggaacaaaggaactagaacaagcaatacaaaacaatgtaaatttattaaagactttttagaactcgaaagggttctatttttttataaaaaattactgttccatagcaggacaccataagaaaggatgatatataatgtcaaacatgattaatttaaatactaaaacaaatttagagaggttaaaattatcattaaataataaagcctattatacagatgatgaatataagttatttttagaagagaataatttatatccagatgatgtatatgtaaaagatacaatggaaatccaattattagaaactcaagttgctgtattggaatcattaagtaatgatatagatttaatgaggaaagttcaagctgaagaaataggacttacaacagaagaagcttataaatatttagaaaaaagaataggaactattaatgaaaaaatattgaatctaaaatcaatacaagatactcaagaagattatagtataagaccatttttctttaatggcacagtataaggaggtggaaagatgaataatagtataacattagatagcagctataaaaaggctattgaaatgtgtggagttaatgcaactattaataatattgatacaaaaatattaataaaagaagcttcagacgaatatggaattgattataagaaaattataagttcaacttcattcaatcaaggcaattatatgtttgtaaatggagttcaatatttaatagttgatgtagaggaacaattaacacaatctatatataatgtaggaacttttagaaagactaaagaaatattattaggttcaaattataaaccggttcaatctatagttgatagagatagaattactcttgtagatggaacttatctgcaagaggtacatgatcaatatacttttataattcccaagttagggaataaaacaggtgtaggaaatactcttgtttatgatttaggaatttataatattatttctatagattcaagtagagatggtttatattatataactgggaaatatagttctgtttatacacctcatacttatgcaattacattaaatagtaattcccaaacacttaaagaaactgaaacttatacgattgtgcctacctgtactgataatggggtagttgtaacatcaccaacagttatttatacttcatcagatacaaatatagctaccgtttcttcaacaggtgttgtaagttgtctaggtgtaggaagtgcgacaataaattgtaactataataatgtaagtgtagatttaacgataactgtcgaggaaaaaccagtagaaccagttgttagctatgtagaaaattggagtcaaaccacaactattaagcaatatgttacaagtacatatacagtaactcgtactactgattcagttgtagaaataccactgatagattatgtattcgatagtgcaggacaagcattgattagcagctcaaaaatagtagtaactcgtaagaatgataactcgttctcagttaaaaatagtacaataaccacaacaacaacttgctatgttaatataatagatcattcaagtggtcatgtgatagcaaatcaattattaacttttgttaaaggtatataggaaggaggcttttagatggaacaagaaatattaaatgtatttataggacaaggcgcatggtgtcttttatgtgttatagcgttaggttattttacaaaaaaagcttccaaaagagaagaaaaacaggaagaaagatatactaaaataattaatgataatagaaaagacagcaaggaacgtgaatcaaagtatcaacaaatgattgatagaataacagataaatttgctattgtagaagaaattaagaatgacgttgattacataaaagaaaagataagtaaatagattatacatgttgaattagtttttagaccaatagagaaaaaatcttttatttctatattctattattaaaattttcattagcatatgtatattatatatgaagtaatggagagaatgtaatacaaataatatttttatattacaaatataatataaaaataatatatttgtattacaaaaatattatagaggtgatataatatgaatataaagagatataatcttagtcaaaataatattaaaactactaagatgataattaatagtaaaagtaaaattaattgtgaaggaaaaattaatggaggtgttagtatgttaacacttagtcaaataagagaaaaaaatagaactgctacagctttattgggttcagatattaaagagcagaattattctgatgaattaataaaacaatgtaaacaagaatttgaaacatttgttaaacctattagaaatagagttgttagcagaatgttgggagagaataatagtgaagtttaaaaagggacaaattgtaaaatatagttttcccaagattgaggggaataagaatgtaatagtaggagagcattcggcagtagttttgttttcaagagaaactccatatagaactatactcattgcacctataactactgcacagtcattaaaagatgaaaataaaatacctcaaaactatgtggaattagatttaaataattatttaggcgtcttagaacatgattcatatattaatttagatatgatttttccagtagatgataaagaaattgaagtattagaaaagtataacaaaaaaatagaaaagtttttagatactgatgatttagagcaattagactataaaattgcattaacatatgaattacaaaaatatttaaacaagcaagtaaatcaagaagtaaaaactattgttgagtatatagatacaagcattaaagaaaaaattaaaaaagcattagaagttattgaaaatgaagatataatgaatacaattatatatataattgaaaatgacttaataaaagaattgaaaagtacatataaatagaaaatgtttaaaagaatccagcaaaagtgtacaagctttactgggttcttttttgtttagaaaagggtatagaaatatattcttgccttattttttttgaatttattattgaaattccaattccatacatatataatagactaaattatatataggaatggaacgatatcactttcatattaacggattctttctaaatgacattaaatcatacttgaaccattgaaaataaagggcttcatggcgtgaaaggaatggagttcaaaaatgtctatgttataaattgtgtagaagaaactatacctcatgcatcaagtataaaggaaaatattgaggaagaacgaagattattttatgttggaataactagggcaatagataacctgtatctattttctccaagaaacaggaaaggccaatttaaggacgtttcgaggtttattattgaaggaaaattaaatgatatgcctgttgatacttatggatacgagattggaaataaagtagcccatagagcttatggtgttggagagattactggatttgatgaaaatgacaaagataagattaaattgaagtttgatgatggaatttttagaagtttttctttgaaaattttggttgataacaatttaatatcaaaatgttaaattaaaaagataataattaaatttaagttggtagaactccattcatgtaacagttgagaaattattatgtgaatggagttattttattgttaaattatttaatcacaagatttttataattatcttttgtaatcactttatcttttaccaaatatttatcaggaatatttttattaagcaaaagattttccataagttcctgagctgcaatttctccaacttctgtagcacttatgtatgcagacgctataagaggagagttttgtttttgaaattcatcctttgctacatatccacctacccctacagcaacagcattttctgcaagaccagattgatccagtgcttttattgcaccaatggtgccagcttcatttgcagacatgacaaaccaattctttatatttttattagacgttatagttgatgcggcagaataaaaacttttttctgattgtccattatattcggcttgaaaaatattttctcttggaaagcttggaagcctatctttaaatgtttctaactgtccttcagttctaggtatgcagctagatacagaatccattgacataagcagaagtcctgaagaattaggatcacttaatttattattcttttctaaataatctaccatgagactagtcatatcccgtccaatttgattagaatctattccaacaaatggtgcaatataattaccttcatcatcagtaagaggatcgtcgcaggctataacagcaatatttgatttcttacatctatctatagtgattttacttaatttttgatcaggaacgcatattaatataccatctactttttgagtaattaaattatccaaagcagataaatacacatcaggattcattttagcatctatagtaattacatctttagcccccatagctaaagccttatttttagcagcctcactttcttcctgaaaccaagcttcatctaaagttttgtaaataacggcaataactaaatcagatttttttgagctctgtttagaagttgtagtatcacaagagaaagcaaaactagataaaattattattacaactaaaagtatcttcttattcatgtaaatataaattcctttcaaaatttttaaaatgtatatttggagtagttataagccattacccaactatagatttttaaaataagagtctctaaattggttcggagtgatacctgtaacttttttaaataaaatactaaattgttgaggactattaaatccaagtttgtctgatatttcataaagcttatagttagttgataaaattatttctttagatttgtcaattctagcttttaaaatatactgcgtaacattttcacctgtttcttctttaaagattctgcataaataaactttatggacattaatgttttctgctatatctgttagactaagagattgattaaagagatttttgtttatgtaatctatggaatcagcaacctttttactatatttatttttaaaagagttattaaaattaatatttattattttagtaaagatctcaataaaccatccgctcatttcttcaacggtttcttttgttgataatatttctataggtaggtatgaagttgaaaaaatatcttcataagctatagaatatctattacaggttcttactactaaatctaggagagaggagtttatataatttagataattaaactgcataaatcctcgtatatctttatcatataagtgagttaactctgattttaagttttcaatattattttgttcaatagctatattaatggcattaattctttttgctaaagtatcagtatctaaatctaaattttttacaaaggtattatttaaaattatagtatcattgcctaggaataccttcattttagaaagtttaaatgcttcatcaaagtatttctttattttaaatggctttttaaatgttgagctcacacttattgttaagctgatattatgcatgagggaaatcctttttcttatttcctgcgctaaataataacactcatttattatatccgcttcactaatggttggcgacaagcgtacaatagctgtgaattctccattttcactataaaaacattcaccaatattgagttcttcgatggtttcagaaacattttttattatttcattaagggtatttgtatagaaattctcatcttctatatatttaaaaaagttatctatctggataaggaaaagaacaaaaagttttccgtttagattaaggttaaggttttcaataaggttataacaatcatcttgacttatatcattaaatataagctttcttagtgcaatatccttattttcctttaggaaatttaaaagtttatgttctttttttatttcactcttttttatagttatattatcaagatcagtttgagtttttgctaatattccatatagatcattaggtgttattaaatcttttatcaagtagtctgttacgcccattttcatagctctttgcgcatacgtaaagtcctcatagcagcttaatattaaaaatttttgagatttatttattttctgtacttcttctattaaatctaaaccatctataataggcatttgtatatctgtaataataagatctggttttatatcagtatatttgtccagtgcgtctttaccatttgaagcgctatatactattctaaaatcagtgtcttcccaatttatgatgcacaagagaatttctcgtgcaggtatttcatcgtctacaatcattactttatacatgctatttgcctccttttttagaattaaggcacactgacttgttatttcccgaatgtgctctagtaaatgtatggaatattgaattctatacaagttccaattccagttttgctatatacttttaagtcatattcgcttccaaaatatagtctgagtctttcgcttatgttatctaggcttataccattaaagcctttgtgagttgattttctcttactaattcctacgccatcatcgataacttttatttttataaaatctttttgtggcaatatatctatttttatagtcccagcacaacctttaggtactattccatgataaagagaattttcaataagtggctgaagaataagtttgggcactaaacagttattcaattcttcaggaatattacatactagtttaactatatctccatatctatacttctgtatcttcagataattttgagtgcatgtaagttcatcttttaacgttataagatttttacttgttgatatgctttgtcttagcagaccattaaatgattgaataagttctcttatttcattttgattattttttatagccaaatagtttattgtatttagtgtattatgtataaaatgaggatttatttgtgattgcagtaaatccagttgggttttcatggattcaacttcaagctttttgttttcctcttcttccttatagatttgttcaattagattttttatattgtaaatcattttattaaaactaattataagatacttaagttcgtcttcggttttggcttctagtttgtctggccattctccattttcaaacttattcattgcttttgtaatatcatatataggatctgtaattttctttgaagtaaagtggctgataaaaagtacaactgcaatactaaaaataccaatacaataaattaaccatcgaatagaatcaaggtttctggttaaagagtccaaagatattaatccaatgactctccattctggatatgcttctataacactattaaattccatatactttacgttattaacatttacagtatcattattaactttttcaagcattatattgtcataatcaatatttcctattttataaatcagattaccatttttatcaacaataaaagtgctatcaaagactccatggcagtaatcatctatgctcataaataaattctttttctttatattgatcataaggtagccgataagggagtagttttctttatccaaatacctagaaaaataagttatagttgttcttttttcatagtcggcattctcataattgaatggaaaagtattaggagaagaaaatttatttgaatatccactttcaataaagttgtccaattctttatttccataaattaattcactataaggatattgtgaataaagaggatccattatttttttatctgttgttaaaggaattatagaaattatatagttactccatttacaatattctgaaagagtattaaaaaattctgcattagtttctggagttgcagagttatttctattaactttagacatataatcataaatatttttatcattttcaatcatataagaatcatgtcttatagaatctaaattttcattaaggattttagaaattacagttattttctcagtagcaacgttattatattgtttaattatttctttagaaaaaatagaacttatagaggacgtaacagctaaagttaatccaagtattataattgaaaaatatatagttattcgatttcttatctttgtgattttttttaccttcattgatcatcaccataggaaattatagcactaagagtataggaattctagtgaaggtatgtacttaatagtggatttaaatttatgtactggctaattataaattaaagatgtggtgtagaatatatcttaaattaaaaatgatgaatatttttaattgagtgctgtatggaaatcggagtaaagaaatgtttattattttttaaaaccaactatgaaagagggatatataaaatttatttttaattaagttaatattttataagaaaagttaataaataagatttttataatggaacgatttcaatataatgtgattaacgattacagaaaacaataacatactgtagtttacggaaatatgaacagtttatatttagggcacttattaaaatcaattgtggaattccatgtgagatgtaaacgttcgtaattttaaaggaggaaaaaagcatgttaaccgttatttcatttttattttgcatcgtattagtagcaacaattacgtatcgtaagctaaaggggcaaaaaaataattcaaaagattcttatttcttaggtggacgtagtttgacaggtggtgtgataggggcatctttattacttacaaatttaagtgcatctaattttgtaggtatgagtgctcaagcttactcaagcaatatgagtgttatgggctgggaagttggctctggtattactcttgtaattgtagctttatttttacttccaagatatttaaaacaaggggttacaactgtgcctgattttcttgaagaacgtttcgattcaggtgttaaaaagatagtttcaatattatttttattaggttatgtttcgaatttacttccaataactctttattctggtgctattgcattggctcaaatatttaacgtgcaagaaatgtttggtataagctatacagctagcatttggattatggtttggattatcggtataataggatttatttatgctatacttggtggattaaaagcagttgcagtatcagacacattaaatggtataggattagccattggcggattaatggtacctgtattcggaataatatattttggtcatggaagcttttcaacaggattatcaaatatattagttaatcattcagataaattcaatgctataggaacatcacaagatcctataccttttggaactttatttacaggaatgcttttagttaatctttattattggggaactgatcaagcaatcattcaaagagcattagcagctaaaaatttagcagaagggcaaaagggaataatttttgcaggacttttaaaagtattaacaccattaatagttatagtaccaggaatagtagcttttcatatatatggagcaggtgttgaaaatccagacttattatattcaagactagtaaacgatgtattaccaaaacctttaattggtttctttgcagcagctatgtttggatcagtattaagtgtgtttaatggagtgttaaatagtgcatcaaccctatttgcattaaatgtatatagtcctgtatttggaaaaggaaagtctgataaggaaataatatcaaagggtaagatatttggacttgtgttagctataatttcaatgactatagcaccatttataatgtatgcaccacaaggattattccaatacttgcaaacagtaaatgggttcttcaatgtgcctatattcacaatagtttttataggatatgtaacaaaaaaggtaccggctatagcagcaaaaatatcaataatattttttgtattaacttatggaacacttcaattaataataaaaccagaaatgcatttccttcatcaattaggaatcttatttgtaatcacatgtatgattatgctaattattggtaaaataaaaccaagagaaaaggaatatgtgttaaaagacaataaagtagtagatattaagccatggaaatatcgttatgaagcttgtggagtagtattattcttgatggtatcaatgtatgttgtttgctcaaaattaggatttgccagtggaaatggaataggaattagaacattggtacctatagctgtaattgcagtagtaatgtatggattagtgaaagtagtcaaggcaagaggtctaagaaagaaagcgggagataatgcagagttagtttacagaaattcagtagagaaattggatttttaactaaaaagtcattagggatttagtataggtgaacatatttaatcctaattatgtataagcagaaatcatacttaaataatgatttagtaagtcgataaagttagtattattatatgagtttctgcataatatattatacccatataattttaaacatctcttcagataaaatctcccaccttatttatttaagggggagattttagacttttcattaacactttatttagaacaataaatgttgcgaattaaatgattaatgttctcatataatattaacatccttttaatatttattttcttttaacattgcttagctcctttatgggagatttgtatttattataataaaagcacaaaagctagaaagttaagtactttctagcttttatatatgttgcaataataaacttacatttaaaattctaataatccaagtgcttaatttaaataataatgtaggaattaaattgtagtatatatacattctaaaatattaaattatttacgtcttataaatataaacaaatcatacttttttgaaagtatggagtatgaaagaaagctaataacaccagttactaatgttaatactaaactatcaagaaatggaaaggtgacagcgaaagaaggaattttagtctttagaaaagacataatcataaatggaattaacacaattccaaagattaataatgagcgaagcttaggactggatgtttccttatgtcttaaaatagtatttgagatgaaataccctatagatattagaatacaagtaattaaggtgctcattaatactcctttttcaaataaaacatctagtaaagtaaagaaaaaaactagtattgaaaaagtaaatatgccttcaagtacttgttgaatagcagacactgaagaattatactcataaattaacttattacaaaacttatccagatctttgttgcattctaatttttttgttggaaccttctgattttgagctgtaaatacaatatcaaaaatttgtttttctatatttcttggtaataaaaggctaaagttatgttgcatcaaacatgcttgtatagcatgataggtctctaagtagttattttttaataaagatatattaggtctactttgcatgttatccccctcttaaaaactaatgattttaattttgtatacatttatttctatagttaatcatttttatgtattaaaatcacggcaattacaccttctaccattttagcagagggaagttaataagtaaataagttgaagtaatgcaaaattgtgaacaaatattttaagtcattgtatgtaattggcttataatatataatttatagtatatttatgcaggagttaaaaatataaataaaacaataaaggttggttgtgtttatatggaattaaaaagatttaatcaaaaggatataatttttgccttagatataggaactagatcaattataggtacagtaggaatagtaaaagataagaagtttcaagttgtatgcgagaaatatttagagcatgaagaaagagccatggtggatgggcaaatacacgatattaatttagtggcatctgttgttcaaaaagttaagaattatctcgaagatgaacttgaaatacagctaaatgaagtatctattgcggcggcaggtagatttttaagaactattgatgtaagagcagatattgagcttaatgatgatgaagaagttaataaagaaatcataagaagtcttgaattgagtgctgtaagaaaggcagaggagcagatagcttctacaactgaaggaaaactatattgtgttggatattcagttagaaatttctacttaaatggatttttaatatctaatttattagggcataagggagaaaacataggggcagaagttatagcaacttttttacctaggtctgtaattgattcactttatgcagtaatgaatagggttaatttaaaggttgtaaatttgactttggagccgatagctgctatggaagctgctatacctaaaaacttaagactgcttaatatcgcgcttgtagatataggagctggaacttcggatatagccataagttctaaagaaagtatatctgcatatggaatggttccaatggctggagatgagattacagaaactatcgttcaagaatatttagtagactttaatactgctgaaaatataaaaagatctatagtaaaagaagaagaaataaaatatattgatgttctgggtatggaaaatataatatcatcagaaagtgtatacaaactaattgattctattgttattaagactggagaagaaatatctaaaaagattttagaattaaatgggggcaaggctccaagtgctgtatttttagtaggaggtggagctcatacacccggaattttagaggctattgctgataaattaaaattaccacctcaaagaatagctattaaagataggcaggcagtgatagagtgtgtttcagataatgatatgggatcatcaggtgtaactgttctaggaatagctttaacagcaatacgtagtatgggaaatgattttattgatgttattttaaataatgatccaattagtttatttaactcccataaacatactataatggatgtattgcttcaggcaggaataaatccatcgctacttataagtaaaaatggtaaaagtgtcaggtttaactataatggatgtaaaagaattgtttttggtgaatatggaactaatgcaaagatcagaataaatggagaggaagcgactcttgaaacagaagttaaagcaaatgacaatataatactagaatacgcacagaatggaaaagatgcatcacctaaattatcagaaaatataagaaacataaattcagtttctatttatttagatgataatattatgaatatagaacctgtaacgcttgttaatgagaaaagagaagagttagattatataataaaaaatggtgatgaaataagagtattcttaccatgtaaagttaatgaatttaagaagtatatattaaaagaagaggtaatattactaaaaggtggagaatacttagaagataattatgaaattttagaaggtgatcacattgtaattaaagcaatggattcacatataggacatgaagaggctgctaaggtaaatgatagggaagattatgtagatgtgatagaaagcgaaaatatagaaggttgcaatgaagagagtgaaaatattaattcagataaaatcgaaatagcaattggtagagaagagtttagaaatataacagttaatatcaatggagaaaatatagtattgaaaggaaaagttcaatatctaatagtagatatatttgaatatatagattttgacttaacagttccaaaaggaataattaacttgaatttaaacggggaaaaggcaccatacacagcaaatataaaagatggagatataatagaagttttttggagtgataattaaagtttattatttcttagagctaatattttaaatttaggcatattcaaaattaaaataagtcgatatacgaatttattttgtacaattggcatagtgtattctttaaatatgcttaaaaatctaattattattaaatatggagggattagagaaatgatagattttaaaaaagaagctaatcttataaaagacgaacttataaaaataagaagggatttgcatgaacatccagaacttggatttgaagaggttagaacatctaaagtaatcaaggattttttagaatctaataatattcagtatattgaagtagcaaaaacaggtgtatgtggaattataaaaggtacaaaagaaggaaataataaaactatagccttaagaggagatattgatgcacttcctattaaggatatgaaaacttgtgaatttaaatcaaaaattgatggaagaatgcacgcttgcggacatgatgctcatacaacaatacttatgggagcagcaaagttattaaataataataaagataagttttctggtacagtaaagttattatttgaacctgctgaagaaactactggtggagctacgcctatgataaacgagggagttttagataatccaagagttgattgtgttattggacttcacgttgatgaggaaacaaaatgtggcactataaaaataaaaaaaggtgtagtcaatgcagcctcaaatccatttagtataaagataactggtcaaggtggtcatggagcatcaccgcatactactattgatcctattgctattgctagccatattgtagtagcacttcaaacaatagtaagcagagaaatatcaccagttaatccgattgttataactgttggtacattacatgcaggaactgctcagaatattatcccaggagaagctactctaagtggaatgattagaacaatgacaaaagaagatagggcatttgcaataaaaagattaaatgaaattgtaaatgggattgcagttatgtcaagagctaaagcagaagtaaaaatagaagaaagttatccttgcttatataatgatgatgagtttgtagatttaataagtgatagcgcaaatgaaattttaggaaaagaaaatgttttagaacaaaaagcgcctaaaatgggagttgaaagttttgcttattttgcaaatgaaagaccaagtgcattttattttttaggttcaggaaataaagaaaagaatactactgagccagcacatagtaatttgtttaatatagatgaggattgtcttccaattggagtttctattcaagctttggcagcatttaattatttaacaaagtaatagtattattttgcgattttatgtaaaataaattgacaatatgtttaaaaaactagataatgctaagggtaataaatttaggagtgattatatttgaaaatagaaataggtccaaacgaggcaggtcagagattagataaatttttaagaaaattattaaaagatgtgccattaagcgcaatttttaaagctttaagaaaaaaagatataagggttaatgggacaaaacaaaatgagaaatacttcttacaagaaggcgatgtagtagaaataaaatacatacaaagtaacaaagaagataaaaaagaaaagtttattaaagttgatcctaaaagaatcaagattgcatatgaagatgaaaatgtagtagtaattgaaaaatggccagatgtattggttcattcagatagcaataatagtgaagaacctactcttacagattatgttctttcttatttaaatgataagggtgattatattccagaaaacgaaataacatttacaccagcagcatgcaatagattagatagaaatacttcaggaatggtcatgttcggaaagactttcgaaggtttaaaagccataaatgaagccattagagaagacgaaataagaaaatattattacgctttagcaaaaggaaaaataagagctggactttatgaggcgtacatattaaagaatcctgaaactaacacatctaagatatacgacactgaggttaagaactcaaaaaaaatatcaatggaaataagtatagtggaaagcaatggtgcatattcacttttagaaatacacttaattacaggaagaagtcatcaaattagagcacatttagcacatttaggaaaccctataattggagataataaatatggagataagaaattaaattcattttttgaaagtaaatatggtctaaattttcagtatttatatgcttataagttgaattttagaaaaattaatggaaagttagaatatctaaaaaacaagactatagcatcggcattacctccaatatttaaaaaaataaagcaagatgtatttaagttctcacttagataggaggtaattatggaagatcaatcagccaatagtagcagaggctttttaattctttcaatagcagggcttttaaccaaagttatatcagttttttatataccactgcttcaaagaataattgggttagatggatatggaatatatcagaattgttatgaagtgtttttatttgtatatgcagttaccaacttagggactcaaccagctattgctaaagtggttgcagagcttacagcattaggaaaaccaaacgatgctgtaagagctcttaaaatatcaagaactcttttatctttagttggtgcggtattaactatatttttaatgctgtttgcttttcctattggaaatatgattggaaacccagcagcttcttatggaattttgatgcttgcgccaagtatatttgttacatcgcttttatcatcgtatagaggatattttcaaggaagaaatagtatgactgcaattgcggtatcacaagtattagaacaagtaataaatatcgcaattagtttagcttgtgcatatttcctagtacacataagtgttgaatatggtagtgcagggggaactataggtacttccgtaggtgctttcgttgcatgtctatatatggtatatgtttatggaaagaagaattttgaagaagattctatgtatgctcaacaaaatgttaaaagagtaagaactaagcatatcataagaaagttaattaaatacggcttaccaataacattaagctcagggcttcagaattttggtagcttagtagatatggtgaacgtaaatagtaggttagcatttgcaggatttgatttacaacaatctcacgtgctttatggggttcttgggagatataagaccttattatctgttccattgataatagttactgcccttgggacaaccgtattaccggctgtttcagcagctatggcattaaaagataagaaggaaataagaagaaaaacttcttttgcttttagaataacattaataataacaataccagcagctgtaggcctttcttgcttaggacaagaggtttttgaattgctttatggaactgatcaagggtttgaattaatggtaatgggatcagtagttttggttctcatggctgttgtgcaaatacaaacaataatacttcaaagtatgaataagctttattatgtgcttggaacatttagtatagggatagtagctaaaataatagctaattacatattagtagggataccagaaattaatattttaggagtagtagcaggaaactttttatggtttgcaataccaatgatcttaaataaaagagcattaaaaaaggcacttagagttaagattcctctttttagaagcgcagttaaacctctttttgcttctgcaataatggcaggtataatatttatgctcaagacaccaacatcagttatactaacattagctaatggaaatgttttcttaaaagcaatttcaacgattttaattatttctatagctggatttgtttatttatattcaatgatgttaataggtggaataaaaaagaatgatatagacagtatatcacctagaatatttaactatttacctagatttttgagaaaaaaacttcaaaagtaaagaatgggatttaactataaacatttagtcagtgtatttataatatctgctatggccagacggcttcataggattatataatgtacactagcaaaaattatagttaaatcccaatttgctttaaacaagaacaaagccttattaagctaaactatatgaataactgggttacatagatattaatattcattttctccaaaggtaccaaggtacgtaaaaattaagaaaacaagacccattataataaagttatttatgactatagaattcgtgaacatatgttttgaaaatatgtttataattaagaaagttaaaaatccaagcaatatatatattactatattaaatttgtttaaattaagttcaatatgtttgttaacctcgtacatattgagaataaagccaattgtacacgctacaagcatagttaaactataaccaaatatattaattgcatgaatagcagtaaatatgtataaacatatcaattcaattacggcttctattaatgagtttcttaaaattattccttgtctattaagtccatttagtattccaaacatagttactgcaggaaagaatattggtgcagtaagtgaagcaaatctaatatatagacctaagtcattccggccataaaacatctcaccaaggctatggggaataacattacaaattattgttgttgctataccaagtaagaaagcaactttaaggacctttcttattctaacagaggcttcatattgttttcctaaaactagactttgagaaagatctggaattaataatgtattaattgttgagaccacaattaacggtattgttattatgctaagagccatcccagtatatttacctatcatacttaaagcttcagtataagtaaaaccagctactagtaaacgccgaggaacaattagtgttgcaagagtccctagaatattagttaaaaaaccatttgcacaaagtggaattgctataattaccacatcaaagagaagctgaaatctgctttcagtcttttcgtgagaaatgggcatttttctaattgagtatttgtagtaaatatagaggaaaaataagctttgaaattcaccaatgcataatgcaactgtagctaaggttaccataccttctaaagtattagctttagtaaaaaatataagcatgcttacagttagaattctcatggccttttcaaaaatatcaattatagctggcactgtaatcttagaagttccgtaaaagtatcctttaagtatatttgaaattgctatacataccatagctggacagataacttttattgcatttatagtacgagcgtcatttacaccgtatttaccaattagtggggcgcatataaatactagtatacctaccaagagtgcccaagatatattaaataatgaaacaactctaatcgttttttctatatttttatgttcccctttttgtgcatagacagcagttattttggatatagaagcaactatacctgcagtcataagacatataaataaattgtaaataggcataaccaaattatagagccccattccttcggctcctaggactttagaaagatagatggaaaatataaaaccgagtatacccgtagtcacgttagaggacactaataaaaaagaatttttaaaaaaattatctttgcccaaagttcattcactcctttaaattactttaaataatattcaaaatgataactaaatatgaatttgaaaattttagatataaaggtagaatgatataaaataaaacaaatatttacaaagaagtgctaaaaagatataattatctgtggctaaattataaaaaacaattgtactaaatgggggaaacataatgaacaaaatttcagataataatatgataaattttttctataatgcattgccatctctagaagtcctttttgatgaagatgtatctatggcattaactgatactaagcaatatttatatacaaagtacagccctaaattggaattaaacacaaataagggagatataattccagaaggaggagctataattgaagtgttgagaactgggaatactatgataaaagttgtgccagagcatgtatatggaactgcttttaaatcattcgcaattccaattaaagaagaaggtaaagttgtaggtgtttttgtcgtaggaaaaagtttagaaagaaaaaatgctgtgatgagtataactaaaaatttaacggaaactttatcacaaatatcaataactataaacgaagttgcaaaagatgtacaagagttagcgacaatgaatgaagaattattattggaaactaaagaaactaatgaaaagaccaaagatacagataatatagtaacatttattcaaggaatttcatcacagacaaatttattagggttaaatgctgcaattgaagcggctagagctggtgatgcaggaagaggatttaatgttgttgcccaagaaattaggaaactatcaaattcttcaaatgagtcaataaaacagatagattcagttataaaacatatatcaacatcaataaatagcataaatgatggtttaattaaatctaatgatgtctcacaaggtcaatcagctgcattagaagaaatagcagcatctatagcagagttaaactcaacagctaagaaattaggagaattagctgaaaatctttaatttatggaatattgattaacatatataaacatctttacatagttaaaaagaatatagaaattagtaggagtaataatacatatattttatgtgagttattactcctattttaatatgtaaaacaaaataaaataaaatgagacaaatatttacaaggaaatgttaagaagatataattatctagaccaaatctataaaaaaacaattgtattaaatgggggaaatataatgaacaaaatttcagataacgatatgataaattttttctataatgcagtaccatctatagaaagtctttttgatgaagatatagctatagtattaactgacactgagaaatatttatatacgaaatatggccaagaattagtgtctaatgtaaaagcaggagatctaatacttgatggtggtgctatagttgaggtaataaggacaggtagaaatatagttaaatttgttccaaaacatgtatatggtgttgaggtaaaatcatttgcaattcctataaaagaagaaggtaaggttgttggagtttttgtagttgccaaaagtctatctaagaaaaatgctgttacagatatcacgaggaatttaacggaaactctttcacaaatatcgataggcataaacgaagttgcaaaaggtgtacaagagctggctacaatgaatgaggaactattattagaaactaaagaaactaatgaaagaacaaaagatacagataatatagtaacatttattcaaggggtttcatcacagacaaatttattaggattaaatgctgcaattgaggcagctagagctggtgatgcaggtaggggatttaacgttgttgcccaagaaattagaaaactatcaaattcttcaaatgagtcaataaagcagataaattcagttataaaacatatatcaacatcaataaatagcataaatgatagtttaactaaatctaacgatgtttcacaaagccaatcagctgcattagaagaaatagcagcatctatagcagagttaaactcaacagctactaaattaggagaattagctgaaaatctttaatttatggaatattgattaacatatataaacatctttacatagttaaaaagaatataaaaattagtaggagtaataatccatatattttatgtgagttattgctcttattttaatatgtaaaacaaataagatttttaaagagaggtcttattttattaaatttacaatataaatttaatatggatattatgatttgtacataagaagtatttttagaatttaattatagaggtaaaggagggaagtgtagtgaaaagatttctaaagtttttgattatatcaattataatagttgtactagcttttgctgtatttaaattatctaatgaatataggatgaatacattaaaaaataatgttagctggagtgttgtttataaaaattgtaaagattctgtagcttttgagaaagatgaaaaccaaaatacctatatagcttacaataattatattaaagttattaaaatagatggtagggaagaaactttattggaggataaatccttagaaatagaaaacttgctttattataataacaaattgtattttatttctaaaacagatttatatgaatatgatttagcatcaaaaagtttaaaaagcattttagggaatatacctagtgaagggaaatatttggataggaatttaattataaaggattcaaaattacttttagcgataggaagtgctacgaattcaggaatagcatctaatgatagcgagtattcgcagaacaaaataccttatgataaaagctctatagatgtaacattaaatggattcaattatggtgaaaagaaaacaggagcttttatgccatatggaaattccagtgaaggagggcaaaaaataaaagcccagagtatagcaaactcttgtataattgaagtgaatctaaataacgataagacatcattatatgcttcaggaataagaaatgtaaagggatgggatctagatagtgaaggaaatctaattggaattgttggtggaatggagaatataggggataggcctattaatagagattttgattatttgtataaactagataaaggaaaatggtatggttggcctgattttagtggtggagatcctataagttcaccaaggtttaaaggggaaaaattagtatcacctcttattgctaatcctcctaataaaatagttcaagcacctatatatcaatatccagaagttagtgcgataagatacttagccatagataaagatggaaaaatattagaaaagaattcgaatgtatattttaatagtaaagagaaccttatagctggaataaattcagaaagtgttgtgtatgacttattaaagttaaaagataagagtaaaatacagggaattaaatattcagatggagatatttatatattagatagtggaatgggctgtatatataaattacaatctaataattttggattaaaatttaatcttccaaaaccaatttggatattcatatttgtatttctgtttatattaacctgcttaataatatttaaattttatactaagcattcatataaaaaataataaaaaagagtttgagctgtcttaagtgatattttatcaatttaaggcagttttattatttaagtaatctgataaaagaaaataatttatattcaaatttgtggaataaatgttaaaatataataaaaggtatgagtaataatggaggagatgttatgggaaaaacattagtaattaatttagaggatgttatatttcaaggagacatattggatgtaggagaaaaaaatcttggtataatatataatatatcaaaagaagcaaaggatgagatatcattagattatgtatctagcgacagcaaagtagatctaaaagatagaaaatacgatgcatgtacatttttctttgagttaaataaaatatggactagtttagaaaaggaaagattaataagagaaataagttcatatataaaagaatctggtgaaatatttatttgggatattaataaagaaaggggaaaaatatttaataataagataaaagtaatattacaaaatgaaaaagttaaggagtttacatttaagaatttaaatatacttttaaattcgaatattgaagaaataaaaaaaattcttgaaaaatattttgaaatagaagaaactaaagcgtgggaagatgttttcttcataagaggaaagaaactgaagactaaagctgaagtagaggagaatattaattatgaaggtattaattacagcgattgactctaaattcattcatagtaatttagcagttagatacttaaaaagttttacaagagatatggattatgaaagcaaaataaaagaattcactataaacgatagggaaggtagaatacttgaagaaataattaaagaaaaaccagatattgtagcattttcaacatatatttggaatgttgaacttatctcaagagtggctaatttgataaagagagtggattctaatatagaaattttatatggtggaccagaagtttcatttgactcaagaagtttcttgaaaaataatgtaggagaatatgttattgaaggggaaggagaaaaaacttatagagattttattctatataaattaggtaaaattaaactggaagatgtcagagggcttcattataaagttaatgatatagtttattccaatgaaaagcgtccacttatgtcaatggatgaaatagtttttccatatgaagaaaatgaagatttgactaataaaattgtatattatgaggcttcacgagggtgtccttttaactgtaaatactgtctttcatctacaagtcatggagttagatttttagatattgatagagtattaaaggatttaatgtattttataaataaggaagttagattagttaaatttgttgaccgtacatttaactgtaattctaaatttgctatggcaatatgggatttcttaataaatcaagatacgaatactcaatttcattttgagatatcagcagacatattaaagccacaggaaatagaacttttatcaaaagcgccaaaaggaagatttagatttgaagttggtgttcaaactactaatgacgaagttttaagaaatataaatagatttgttaatttcagtgatataaaagaaaaagttttagaaattgaagcattaagaaatatagatcagcatttagatctaatagcaggacttcctggagaagattatgaatctttcaaaaagtcttttaatgatatgtatgaaataaaaccagaggaaatacaacttggttttttaaagttattaaagggatcttctatgagagaagatgcagacaaatatggaatggaatactcaccatatccgccatatgagatattaaaaacggataagatctcatacgaagagttattaaaactaaaaaaggtagaagagatggtagataaatattataattctcaaaagtttaatcatataattagatattttgaaagaaaatttgagttaccatttgatttttattatagtctaggaatgttctttgaagataaaggttattttagcaaaaacataggaaatgctgaatactataaagtatttttagattatagtgaaagtgcattacaagaaagtaacaaatatttaaaagagattattagatttaattacttaatatttaataagaaacgtggtcttccagaatttttgagaagtgacatggagaaagaggaagaaaagagtataaaagaaaaacttaaagaacaatattcatttaaagaatatcatttagaaaagtttaaaattaacatagagaaatatattgaaactggagaaatattagaagaggatacttattatttatttaatgataaggctgaatatattagatgtatttaagtaatataagaaaatattgagacttatttatatttatgtaggttaaataaaataaaaggattattttaatatagcaaagagtaacatgcataggaataatatgaatgttactcttttatatgattagataataaacttttataaaaagcttgataattagtattattaagctttaatttttgcattgacgaataaaatatatttttatttttagaaaagaggagtatagttaaatagacaacatgttaactaaaattatatttgggggattaaaaaggtgaacgaatattatatacagcaaattttttcaacaattttctatttatcaaacaagattcaagtacaaggggataagatggatgaaagaataactgtacgtcaatggatggtgcttttgacaatttcacatttaccagaagacaatgcatcttatagcaaaatagcagataagatgggatgtacaaaacagaacgtaaagcacattattgatagcttacaaaaaaagaactatgtgcttttggagaaaaatgaaaaagataaacgtgctataaatataaaaataactaaagaatgtagagaaattatgggagagtattacgaaaaaggaaataaatttttaaaagatatgtttaatgaccttgaggagaaggaactagaaaatttgtggcatttgttgaaaaaaatagcaaactatgatggtagcaattggactggctatgaagaaagagttaatatttaggggagaggttaatggagaataattgtacgataagtattatgcctgaaacatcaaaagttgatgaacctgtaacaataaaaataagtggacttttaaaaaatgaaagagtattaattcgcgccttaagcaatgattattattgcataaatacttctatatttgatgtagggaacaaagcagattgggaatcttatgcggtttttgtggcggatgaaagtggaactatagatttagaaaatgctaagcctgttgagggaacatataaagaggcagataaaatggggcttttctattctatgactgtaaaagaaaactataaaactaaaattcctataagattaagtgatattggagagaacagagattatacaatgacctttcaggtagagcgtaatggaagagttatttcgtcaaaaacacataaaagaatttattgtgatgaaattatttcaagtgtagatgtagtagaagataaacttttaggaagatattttacttcaaaggaaaatatacctaagccagcgattattgttttgagtggaagcgatggtagacttgaaaaggcacaggcaattgctgaaatatttgcaatgcacggatattcagcactagctgtatgttattttggtcttgaaggaactaataaaagtttaagctgtgtggagcttgaatgtgttgaaaatgcgatagattggttaaaaaaacaatctacagtggccaaaaataagattggaatttatggtagatctaaaggtggagaaatggttttacttgccgcatctatttttaaagacataagttgcgtcattgctaatacgccaagctgttatgtttatgagggtttaaaagctaataaatttccttctaaacattcatcatggatgtacaaagggagagaaatcccctatataaaatttagtttctctattttgattcggacacttgtaaaaatgatgataggaaataaagaacctatggcttggatgtacaggaagctcattgaggatggaaatgcttatgaagctatgattccagtagaaaaaataaacggaccaattcttatggcttcatctttaaaagataaaatttggccttctaaaactcactgtgaaataatcgtggaattgcttagaaaagctcattttaaacatgaatataaacatatcacatacgaaaaatctggacatatgctaactgtaccgtatcaatctatatatccttcaaataaatatccagacgatatagatggttttgcaaaggcaaatataaattgttggaatgaaactataaactttatagacaaatggtcaagacaagatatctaataaggagaatgatttaccctagaaaatgtatctaaattattgaaatggctccaacccctgatgtttcctataaatatttatatattttaatagttaaatattaaagtatataaatatttaactatatatgtttgaaaatatatatgatgttagtatagttttatggacacattcttgaaataaattataattaaagtaagagaggtgtgtccgaatgagaaggaaaagttatacagaagattttaagaaaatgataattgaggtctacaatactggaaaaccgattaaagaaatctgtaaagaatatggcgtttcaacaacatcacttaataactggatcaatcaagttcagccaaaagagaaaatatctaagaaaccaataataactaacaataaaattagaaataatgaaataaaagacaaaaaagatgttgaagagatttctaagttaaaaaaagaaaatgaaaagattagaatggaacttgaaatcttaaaaaaagctatagccatattctcaaaagacgaagagatataattaaatttattgatgataataaatcgatttatccagtgagattgatgtgtaaagtcttacacatgcctaaaagcacttactatcaatctcatcactatactccgtcccgaaggacgttggaaagtgaaactctaaaagatcaaatacttaaaatttatactgaaagtaatcgtaggtatggtgcgcccaaaattcaaaaaatacttgaacaatcaggacataaaattagtattaaaagagttcaacgttttatgaagcagttaaatatatattcgatagtaattaagaaatttagacctgcaaaagctaatagaaaagttatagaacgaaaaaatctccttaagcaagattttactactaataaaataaacgagaaatgggttggagacataacttatatctataccctaaaagatggatggtgctatttggcatctgttatggatttatgtacaagaaagataattggatattcattttcaaaaacaatggatgcttccgtagcggtagctgctttaaataatgcgtatacacttcaacagcctgtcggctccgttatttttcactctgaccttggagtacaatatacgagcacagattttcttaatagattaaaaaaatacaaaatgaaaagctctaatagcagaaaaggatgcccttatgataatgcctgtattgagtcttttcattcaattttgaaaaaagaacaagtgaacaatgttcaatacttggattttgaaagcgcaaaactagatttatttatatttatcgaatcatggtataaccgcaaaagaattcacggctctattggttatattactccacaaatgaaagaggatttggtaaagaaagtaatttaataaaaatgtgtccaaattattgacctaggtccagttttaatatattacaaattagtgtacaacaggatgctgaaaaacgagatattccaattgcaacatcatttgcataccttttacgtattttaagtcaaacatttatgtcatcaatatatggagtaattttaaataatgctttaaataaaggtgtggctgaatctcatggcgaagtcaccattgaagcgctaaataaattaagtgactcccaaagcgcaggagatttacctaaaaatttattgccacttatgaaacagattatgtacggtggtttacataatattatgttagttgcattagttttgttagctattgcgttggtttttaatattggaatacaactaaaggtgaaaaagaagtagtgttttaagaggaaaaaattatgttcttagtttttaattagaccgtaataattttgtaattgatataagatatctttaatagtataatcaaataggaagtaaaccaagatggaatacttggatataatttactactgtatatttaactaaggagtaggaaagatggattatgtattagcaatggtaatttcacttataactgcattaattaccatgccatttcttatgaaactagctaacaaattacatttcacggataagcccagtaaaagaaaacaacataaagtgccaacaccattatgtggaggtctagcattatattttggtttttttgtttcgtattttatatttttaagggatagtatgttacaacaaataactgtatttgttgcagcaacaatgataataataattggtttaatagatgactggcataagactaaaggaaaagaatttgctatatttccaagattagtaattcagctattatctgcaattttagtgtttaaggcaggaatcttttttggtggatttactaatccttttacaggtacctatatagaattaaatccgacaattcaatttattcttacgataacatggatatttggagttacaactgtaattaattggtctgatggtatggatggattggcaggtgggttatctcttatatctgcaataacatttttcttagcagcaattatattagatcaaagtggttctgcattagtatctataatgttagttggaacaattttaggatttctgtattataatagattcccggcaaaagtttttatgggggattctggagctaattttttaggatttattttaagtataacagcattggagggggcatttaaacaggcaactgttttaagtctatttataccaatacttgctttagcagtacctatatttgataatttatttgtcattattaaaagatttttagaagggaaaccagtgtatcaagcagatagaagccagatacattttagattagagaaaagaggtcttactactgtacaagtcgtaaattacataatgttaataagtttatcttttagtgcgatttctataatattgctgttaattaaaagataaatttggtatatttagacattttatattttaagtgaagtatttaaagttaaagatgaaacatttacaaaaaagatattttaatatataattaaaaagtataggaacttatcaagagtggtggagggactggcccgaagaaacccagcaaccggtaaattttatagaattacttggtgctaaatcctgcagcgtaagagctggtagataaggtattaaaaagcatttaagcctaaaggaatacctttaggctttttttgttaaaataaattccgcaaaggaaagattatataaataattgtgaagagtaataatgaaaatttataggacatggtaatgctttgagattagtaataaggtggtgatcaatatatgggagatttgaaactacagataaacaagaatgaagtacttaggtatcttggatataaaggacaggatatagatgaaaatattgtaaatcttattgaggaatgtagagaagaaatcaagaagataattaccccaagatttatgtatgaatataaagatataatacagcttgatgaggctatagaggttgttaatacaaaactaattttatatggaaaagatataaaagagcatcttaaagattcaaaaaagtgcgtattaatggcagtaactttgggaaatgatgtggaaagaaaaacgagattatatgaaaaaataaatttaacaaaagcacttatattagatgcttgtgctacaacggcagtagaggaagtatgtgattatgtagaaaggattgttaaggaaaaagctatattgaataataaggatataacttttaggtatagtccaggttatggagatttgccgttagatgttcaaagtagctttttaagggcattagatgctcagaaaaaaattggacttactgtatcagaaaacaatttactatttcccaggaaatctgttacagcaataatagggataataaatagtggaagtaaaaagaaaataaagagctgcaaaaaatgtactaactacaaaaattgcagttttagaagagagggagaaatctgtggggcttagggaatatataaaaaataacatattaatatttgacggagctatgggaacaatgcttcaaaagaaagggctgaaattaggagaaaatcctgaaattttaaatctaaaagagccatatataatagaagaaattcatagagaatatatatctagcggtgctaatgtaataactactaatacttttggcgctaatgagcttaaactaaaactttgtggcttagtagttgaagaagcaatagatgcggcagttaatatcgcaaaaaaaactaaaggaaatagtgaaacatatatagcactggatgtaggtcctataggggaacttttagagactatgggaactctaagttttgacagagcgtatgaaatttttaaacgacaaataattcaaggggttaaatctggtgttgatataattttaattgaaacaatgacagatttatacgaacttaaggccgcagtgcttgcagcaaaggaaaattcaagtttgccaatattttgtacaatgacatttgaagaaaatttgagaacattcaccggatgtactccagaagccatggtacttgtattagaaggattaggagtagatgcacttggcgttaattgctctttggggccaaagcagctaaaaccaattgttgaaaagatatgcagcttatcacatattccagtaatggttcagcctaatgcaggacttccaacactatcaataggtaatgaaacaaaatatgatgttactaaagaagaatttgcagatactttatgtggattcattgacctgggggtaagagtgataggtggatgttgtggaacaagtccagaatatatcgaggaattgtataaaataacgagaaataagaaacttgtgttcatggaaaaagaatattattctgcagtttgtacaccgtcaaaagtagtaaggatagatggtgttagaataataggtgaacgaattaatcctacaggcaaaaagatatttaaggaagctttaaaaaatggagatttagattatatattaaatcaagcagtttctcaaatagaagttggagctcacattctagatgttaatgtaggattacctgaaattgatgaagcagatatgatgcataaagtaattagagagattcaaggcatcatggatacaccacttcaaatagattcttctgatcataaagcaatagagacagggctcagatattataatggaaaacctatattgaattctgtaaatggagaagatgaggttttagatagaatacttcctatagtaaaaaaatatggagcaagtgtagtaggtttgacattagatgaaagagggattccagcaaaagcagaagaaagatttgagattgcagaaaaaataataagtaaagcagcggaatacggaataagaaaagaagatgtatttatagattgtttagttttaactgtgtcagctcagcagaaggaagttcaagaaactttaaaagctgtaagaatggttaaagagaaattaggagttaaaacagtacttggagtttcaaatatatcgtttggccttcctaatagagaattaattaatgagactttcttggttctagctcttgcaaatgggctagatttaccaataattaatcctaatgtgaatggaatgactagagttattgattcttacaatgttttatataattatgataaaggcgctgaaagttatattaataattatgcaaatgtagaattatcaagagaagtcactattaaaggtaatggagcagcaaagattaattcaaatataaatacagttcatgatttaaagtatattgtcgttaaaggactaaaagaagaggcgaagcaagccactgttgaattattaaaagaaaagaaggagcttgaaatagttaatgagtatttaattccagcattagatatggttggagaaaaatatgaaaaaggggaactttttttaccgcagctaattcaagcagctgaaacggtaaaaaattcatttaccattttgaaggaagaaatatctagaactaattctcaaactatatcaaagggtaagataattgtagctacagtaaaaggagatattcatgatataggtaaaaatatagtaaaagttatcttagaaaactatggctatgaaatgatagatttagggaaggatgtacctataaagactgttgtagaggaagcaaaaaaacataatgcatctttaattggattaagtgcgcttatgacaacgacacttaaaagcatggaggaaacgataaaagcgctaagggaagatgggtacaatggaaagatatttgttggtggagcagtacttacaaaagatacagcagaaagaataggtgcagacttctatgccaaagatgcaaaggaatcagtagaaattgcaagaagagtactttcatagtaaataataaattaagaaactaatatttaaagggttgtcctatgcattaaaaatgcataggacaaccttttaaattacaagaatttatactaaagctaaattataaaatattataattctattatatctaaatcatcaggcatgtatatctttccgctgaattcctctttaccttcatttatgtacaattcttttctattctctagatttttatcttctgtatgatataaaataacattcttaacatttaaatcctgtgcatttttgcaagcatcttttgcagtagcatggtgcttttcatatggtttgaatatttctttttgagagtagaggcaaaatgcttcatgaaataaataatctacattatcacaatatttcttcacagtttctctataaggttcatcacctaaaaatgttagagacttaccattatttaatgttgttgtaaatccatgttggagatcttttgtgctttttatatcgaagaatgtagtttttctatttaatatagttgctgtatagttatcctcaattccattaaataatattctatcatcaaataattttaaaaattttttttgaagcacaaatgaagaaattgattttatagcatctattgaagttttgtggcaatagatatttaaatttccagagtatttatcatttagtatgctttgtgctacagcgcggataacccaaatgcttcccagtatatgatcattatgattatgagatataaacatattatgtattttattaattggtatatttaacttttctagatttgatagtattgtattgccaccacctgcatcaataaggaagtgttcatcttcattagagaaagtaaaacacgtattatagcattttgtaaccattgctgaaccagtgccgagaacatatattttttccatagtaaatctccttgtataaatataaaatttttaaagataatatgagtaaagattactaaatattaaatttaacataattacaattataagagttaaatgaaataaattcaatattatgatagtgctacataaataagcttaagtttgaaatataaatacaaatatattttgtcaaatgcatttacttataattagacatgctatatactagtgtatatacatgtgatgcaagaggaggagaaaatataatgaataataaaataaaacaaatggtgtatgccggattacttacagcattagcaataataattcctattcagtttggatttttaagaatagttattccaccatactttactgcaacattagcggctcatgtacctatgatgttatcaatgttgatatcgccttttgtggcagctgtagttggaataggctctacaattggatttttaatagctggaacaccagcgccagtagtggcaagggcagcaactcatatagttgtaggatatgttggagcaatgataattatgaaaaataaaagctatgttaaggcaatagcaataacagctccaatccatggaatcttagaggctttagttacaataccatttataggattttcagttgccgtttatcctgcattgatcattacagttgttggtgcaatattgcatcattcagcagatagcataatagcatatgcaatagttaaagctatggcaaaagcaagaaagaaaaacatttataatgtttttggagaattcaagactcaaagagctttacagagataaggataattagtacttataatttatagaatataatagagccgttcatatttaaagctgagtgcattatatttacatgcattcagctttgttttttaaaattatatggaaagttatagaaaataataaaaaagatatagacaaaaatactaaatatcatataataaggatagaataaatttaaagttgtaaaattgagaagtatgttaaatgttatttgactaagaatcttaagaaaaacaatttcaaattagaatacaatgaggtgaacattttggaagaaaaagaaataatgtcgtttaaagatgaaaatggaaataaagttgattttgaagctattgcaaagatatatttagaagaacaaggatatttgttactatcaccagtagatgaaaagtgtgatgatatgtttgcatttagaatagatattaatgaagaaggcaatgaagaattaaaccttgtggaagatgataaggaatttgaggaaataaagaaagaatataagaaattattgtattaaataggagtgaaatttaatgaagagttcagaaataattgattttttggaagacaatgatttagcagatgttgaagaaataaaacacaaaagcaattatgtgataataaaattttattatgactttgacaaagaagaattaagcgctgcaaaagcatactcaactgaagaaagtgattttgaaccagaaagtgatgaatggtataacgaatattacattccttacttaagagatattgccgtagataatgtagaatcaataattgaagaaatatcagatgagtttgaactagaatctaaatataaagaattcggaatggaaaatggaaatagtggatatttcaagtttatagcagcattttctgaagagttaacagatatagaaatggaagatattttaaacgattactatgagtaaaactggtattaaaatactattgaaaatatatttccttatgttataattaaatcatagatttcctgagatgtgcgtaaagcttatgatattcaacctacattacattatcgggatttacaatatattcataaatgtcaggcttcattaaaagcacagtattgtgtcagtagaagacaggaatgaattgagtttaacccacctgcgaggcgcaggacttgaatatataggtgaacggcatgttgggagctatgattgaattcaacacctctattagaggtgtttttttatgtacaataaaatataaactaaaaagaaaataccaaacctatatctagtttggtattcagttatattaacataaaactaaagttataattaaatattctagttcttataaagtagctatttttatattttatttattgctatattttaagcagctatgttttttacagatttagagttatgttgcttataatatattgaaatcaattctttttgatataagacaatgtacttgtccaaattttgagataaatcaactataaatgttttacttggtgaaaaaaacaataataataagttaagtaggtttttcctaagtacaatattacattttagtttaaaaattacccaagttttcatactaacacctctttttatcagacttggtttttgttatatgattattataaacaagaaaagaaaatttgtaaaaatatttcataatacaattaatgacaataatttgcagaaatgtttaataaaacggttaataatttgtttttctagtagattcatacctgaatagaacataattgtatatattttacagacaaactgttcgacaaacgattacgaagaagaataaatggtgtcgaaaaaattcgggttgattatattattttaaatggtaaaattattgatatacagatagaaaggatgaaaatatgatggacattgaaaaggctaaaatagaagaagttatagaaaaaatcaattcattatataagactagtcaagaaagagaattaagtaatgaagagaaggatttgcaaagtagattaagaaaaagatatatagataatgttaagaaaaattttagagcgcaattagaaggtatagaacttaacaataagaaaaagggatgatgataattgggtgttttagttaaaaagttaattgatgatttaaacttagaagtgcttgtagaaggaaaagaagatgttgaaatttcagtaaatgatataaatagaccgggactacagcttgcaggcttttataattattttgctccagagagaatccaggttataggtaaagcagaatggagcttcttagattatatgcaaattgaattaaggaaaaaaagagttaaaaaatattttagctttgacataaattgcttaatcataactagaggattggagccacatccagagtttataaaggaagcgaaaaagcacaatatatggtttgttagaagtaatttagttactacacaatttataagcaaaactacaatatatctagctgataagcttgcaccagaaacaagattgcatggagttttggtagatgtatctggtataggaatattgattactggagagagtggaataggaaagagtgaaactgcattagagttgataaaaaggggacatagacttgtcacagatgatgcagttgatataaaggacatagatggacagctaataggaagatcacctaaaataaccgttggaatgttagaggttagaggccttgggataattgatgttacaaccttatatggattaagttcagtagttcaagagaaagagataaggctagttatgcattttgaacattggaaagatgacaatgattatgataggctaggaatagataatgaatatatgaatatactaggaattaacgtgaagaaattaacggttcctattagaccaggtagaaatatcgcggttattatagaagcggcagcagtaaattatagacacgcattaatgtctaaaattacaccagttgatgtaatagaaaatagaatgaatgagcttaatgattaatatagtatgtaactatttttacataactcaagtctaagtaaatgatttgaaatgcttagaagatgagatatatatttatcatcaaaaggaggattgactatggaaaatgaaaaaaaagatttaagcaaaaatgcatggaataaatatgatgagaaagaagttcaaagcatattcgagttttgtgaaggatataagaattttatgtctaaatgtaaaactgaaagagaatgtgttaaggaagtacttagattagctaaagctgaaggctatgaagatatagaggaaattataaaaaataataaacaattaaaaccaggcgacaaggtttttgcaaataacaaaggaaaagctgttgcgttgtttattgtaggaagtgaatctatagaaaaggggctaaagatattaggagctcacattgattcaccaagattagatttaaagcaaaatccactttatgaagatagtgagttagcattacttgatacgcattattacggtggaattaaaaaataccaatgggttacattgccactagcattacacggagtggtagcaaagaaagatggtactgtaatagatatttgcataggcgaagatgataatgatcctgttgttggagtatctgatcttttaattcacttagcaggagatcaaatgggcaaaaaagctgacaaagtagtagaaggtgaagatcttaatgtattagttggaagtatgcctttaaagggaagcaaaaaagatgctgttaagggaaatatattaaagttattaaaagaaaaatatgattttgaagaagaagactttttatctgctgaaattgagattgtaccagctggaaaggctagagattatggtttagatagaagtatggttatggcttatgggcatgatgatagagtatgttcatatacttcactaatggctatgtttgaaataaaagagcctgataaaacttgctgctgtctattggttgacaaagaagaagtaggtagtatcggagcaactggaatgcactcaagattttttgaaaatatagctgcagaaattattgatagaattgagggatattctgatcttaaattaagaagatgtcttactaattcaaagatgctatcatccgatgttagtgcagcttttgatcctaattacccatcagtaatggaaaagaagaattctgcattctttggaaaaggaatggtatttaacaaatatactggatctagaggaaaatcaggttctaatgatgctagtgctgagtatatggcagagcttagaaatataatggaaaagcataatgtttcaattcaaactgcagagcttggaaaagttgatgctggtggcggtggaacaattgcatatatattagctcaatacaatatggaagtaatagattgtggagttgcacttcacaatatgcatgcaccttgggaagttgcaagtaaagttgatatatttgaaacaatgaatggatataaagcttttttaatagaggcttaatctcaataaattaagaaaaaagatattatcaagtctaaggactgataatatctttttttattgacagttaatttaatcacctaatattataatagtggtagatctaaagcggatagaaatttcgatagatagttactaggaaattgcatacagccaatgtccccatgacgatcatctgattctaaatcaccgtgaaaatcggaaccacaagaaactaacaaattgtgttcatctgctaaagataggaatctggaagtttcatcttgtgtattttgaaaataaattgattcaatcccatcaaaattcattagcaataattcatcaatattagaatcatttattaatttagggtgagctaaaaatacaagagcattatatctttttagtaatttcaatccgtcgctagtagaaagttttaaggttgggacatatgctttacaacctttcccaataaatttattgaaaacttcctctaggttataaggatatccgcaattgactatttctctagcaatatgaggccttgcaatagtatcattagcttcttttagaattttttcaaaactaacttctatgttaaattcatctttaagcttatcaaccataagtttagctctcattatcctatgatccttaatattagctagttctctaataagatcatcatttttaaagttattatctctaaagaatcccaaaagatgtacactttcattattgtgttgagttgataattcaattccaggaattagcgtgatatcatattttaagctttcttcaatagctttatctaaaccacttaaggtatcgtgatcagttatagctaagtacttaacattgttatcatgggcccttttaaccacttccttaggggataatgttccatctgaagaagatgtatgaacgtgaaagtccactttaagcatataatttaacctccaatttaatttaaggtttatagtaataaaattatctaatttattgtagattaacttggaataatataaaaatatgttatgcaaattttaataatataatcatatcataagatacttatacaagtatactaaaataaaacttagtggcggatatttataacataagttaatattcacattttctaacttatgtgtatataaattaaaacaattgtgccatgatctttttataaaaatatctattttgataaaggtttattagctatatgattacaaaaatcgaatggattgtatcttagcggtaaatctttaattgatataatatcttccttataattcccatcccaaggtgaaactgatatagttgaatcattaaaaatcctaaatagatactggctattatcttcaaaaagtatttttattctgaaaggttcttttgcatcaactgattcgtcagaataattaacagttgttagagctgaaacaaaatcttcaattattgaattttcttcacttggaacttctatttccttatatagattagtatcaaatacataaagcgtgaagttttgattatttaaaattttagatttaatttcatcaatataataatgattacttggttttactgaaaagtttatgtatttaggactttgaagagcgcagctgctcaaagtgaaacagagaaataaaattgtgaaagcaaaagttaattttttcaaaagtatacctcctagaaatacgttatatactattaaatttattcttttagttattttttagaacttttcaattaagccaataagtgataattacgaagattctataatatgaataaaaagtagagataatttgggagattggtttatgtatataataggaacagtaggccctaatgtaaaagatagagcagtacttaaagggataatagagagtggagtaaatgctttgcgatttaactttatacacggaagcgcagaagaatttttagaatttttaaaaatggctaaagatataaagagtgatatccaagtaatgctagatctttcaggaactaaggtaagagtatctggtaaattccaatatattttcaaagtttataatggagaagtaatttatttttgtggagaagacaaatatagtgaagtagtaaaaaatagtaaaaataaaattaaagttatcccattaaatataaaaaataaaattttgaatgaaaaagattataaacaaataggaataaaggataatacgatgacttttgatatcgtagataaagttgatggactaataaaggcaattacaattcggggaggagttattagaaaatggaagggatgcaacataaagaatcttgaaagaaaggagttgccactaaatgaaaatgataaggatgcaatagtttggggagttaacaataaagtagatataatatgccaatcgttcgttgaggaaaagaaagatattgatgatgttaaattatttctaaataacagaaaatcaaatcaatttaagcctaaaatttgggctaaaatagaaacattaaatggagttaataatataaaaagcattttaagtgaagcagatggaattgttataggcagaggtgatttgattccggaaacatctatagaagatactcctatttacgaagaaagaataataaaagaagttctaggagataaagataaggagataattatagctacgcatatacttaatagcatgaaaaatggaaaaatgccatcgatttcagaagtagagagcatatataatttcataaaaatcggagctactggatttcttttggcaggggaaacgtccataggaaaagcacctataagaacagtagaatttctaaataatttgattatgaaatatagaaatatatgagtagtaataaaaaagtgcaagtaattataaaatagcagaaatataaattgattagtcatgaaagtaattgaaatgatattagttagactgaggatattaaaaagtatatgtaaatatatattaagagtataagaaattaatatgatttatttcttatactcttaatttgtctatatgttattatgtattcgcttcaaatagaaacttatgataatagtcaatgcgtaatcataaactaaaagtacaatttgcccagcaatccatatcatatataaaggataatcaatgttaaaatcgactaaaagattagtaaaaataaaataaattactagaagcgatgcattaaaagcgattaatttaaaaaataattccagtggaatatttctaagtttttctgaaaaatattttactattccataaatcccaaagaatgatatataatagacggcaatattggttggaatcaaaaataaactaagaatacttgaggctacataaactaatatagtattttttattgaagttcttattattgagataggaattaagcaagaagctattgtcaatattgttaaagtgcttactggaagtatagaagcagcataaagtacaattaatgttaatgctatagttattccgttttcagctatatattttgccttcataagatattcacctcactaaataaatgcaacttatatatatgttctaaaaagtttaattcatagaagtttactttaaagtataagttaatgtagtggcagtcagccagttttttaaagaatgaattataatatttagaacatatatattataaaataaaagagttaatcatatttatattagcagcagccaattaaatctccgccagcacattcgcataaggaatcaagacaccaaagatttatacaacaattacacatgtcagcattactagtatttgtagttctatagtaaggattagagtaattattacctctttgccttaatgagttcaagccctgcctatattcaaaattatttggatccatattaacagctgtagtcatatgatcaagtgctgaatcaaaccaccctttgttaagcattattgcaccatataaataatgccattcagcagatttgttatttatagaatttaaacgactttcagctgctgcataatttccagattgaataagtcttcttatttcttgaaaatcatatgagttacttgatgaattgttataactagatgtactattggaattataactgttacttccaggattttttgttaatgcctcataagcctcattaatttcgatcattttctcttgtgctaaattttttaatggattatcaccatattggtcaggatggtattgcttaataagttttctataagcactttttatttcatcttggcttgcacctggctttacacctaatatttcatatggattcattataaatctctccttttagtctcatttgtattttctggatttttaactatgttcatatatttatccattaaacctaattcaattatattatataatatatcctcatttctttttaggtttaatttttctaagttttctttacaactatatccacaatttaaaattgtaaattctattttaggctgtatgaattccataaatttatcgtatgttaaagaatttttgttatacaagaaatttattggattaaattttttattttccatatcagatttcaaatcatctaaggcatctattagataaatccattttcctattgaatatcctaatctatataaagtattccttaaatccaatccgtcatcgattaatttataaggatagtcacgtaaaattccgcccactaaatcgctaaaaggatcacatatttcatctatagaattaaatgatttactatcttctaaagtggaaagcttatttaaagattccattatgttgttattaattctaatgattgaactaggaaattttcttttataagggaataaaagaagtgataaaaatttacttttgtaatttttatcatcatgagcatcatctaacagtttataataaaacagggatatattcatagcagaggcataagataacgccttgttattagctattacaatttttttttcagtagggtgaagagaacatctgtgatgagaaatttctagctcttctggatttaatgcatctaatagtaaacctaaaaaagtcatatcataatttaaagacatcctcggtatattaccaaattctttttttatatggcaacataatccacaataatagcatttaaatctagcaaaatcttttactttcatttctgcttttaatggagtaacatatccaaacaataaaaaacactccttataaaattcaatataaatcaattatacagtaaatttaagcatataaacaataaagttcatatatacataataaaattttcagataatattaacatttgtatgactgtatattggacatattatgtatttctgtaaaatatgaatttaattttaatttgtaggaattttttattatagaatccagtataatgttatcgtggccaaaacaggagcgataggagttaagcagtaaataataagtatttcaggaaaatttgaaatatttataaaaaaagtctttacaacggataattattattatataataacaaatgtaggaaacaagaaaacaaaagataaaattaaatgatataaataaaaaataaataaattaaaattttaggaggaagagattatgaaaaaattcgtttgtacagtgtgtggttatatttatgaaggagaaacagctccagaaaaatgtccagtgtgtggagtaggagcagaaaaatttgttgaacaaagcggagatctagcttttgctgatgagcatgtaatcggagttgctaaaggtgttgataaagaagtaattgatggattacaagcaaactttgttggagaatgtacagaagttggaatgtacttagctatgtcaagacaagctgatagagaaggatatccagaagttgcagaagcttataagagaatagcatttgaagaagcagaacatgctgctaaatttgctgaattacttggtgaagtagtagtagcagatacaaaagctaacttacaagctagagttgatgcagaacatggtgcatgtcaaggtaaaaaagatttagcaacacttgctaagaaattaaacttagatgcaattcatgatacagttcatgaaatgtgtaaagatgaagctagacatggaaaagcattcaaaggattattagatagatattttgcataatattataagatagaataatatacacatatttttaactgaataattaatgataattctgcttaataagcaaagtaaaagagaagataataatttatcttctcttttacttttgtaatctttcttcatacaaagatttgtacatattatatgttttctcatctaagcaaaccattgcaatttcatcaaaggtatctggagagttatttataaatgataaaatctcatctaatgctatattgcaggcttcatttaatggataggaataggcgcctgtgcttatagagggtaaagcaatagttttaatgggatgatcattaatataatcatcaagttcttttagtataaagtctctttgtttatcagtattaaatcgataaagatttttatttagaatctcattacactgctttgaataaaattccgagtaattagcagctatgtcaaaaacagaacgataagcatttcttaggtatttttcctctgagccgttatttcggtaaatgggccctacagtatgtattacccaatgcacaccgtggtcactcaagttataagatcttgttaattttgatctaccagtcaaacagccatttaactgtctacactcatctaatagtttttctccgcaagccttgtgaatagcaccgtcaactcctccaccacccagtagagatgcattcgcagcatttacaatagcatcaaatttgatttttgttatatcatcaaaaagtattttaaagttagtcaaattaatcacctcatattagtcatacaaaaattctctcacttaatagtttacacccaattaacataaataaaaatactattttttgaaaaaaatgttaattggctatatgaaaattaaattctagttatacatatgagagaaataataaaataataaagcacacatttaatgtatgctttattattttgtttaattacaataatctttaaattctagaaaaagaactaataaaataaattaattaaataggttgattttctaaattttttcttctattatctaaaggatttaaatttatatgatgtactttcattgtttcgtctgggtccataattaacctgtctaaacgaattctaccttcagaagtatttgcaacaaccatagtttcagtaccctttttgtaaagaacccagttgtaaccgtctgttactactttatttacatcttccattgaaattaaagcagtatccttatgatttccaaatttatctcttaaaattatacccattgtatcgtgatcgattttagtacaatcattttttaaacttctattatataattctaaattttcttttctgttatctaaagtatttccgtttaagtgttttattggagtctttggattaacatctaaaatagcagattgaattgattttttagtggaaactgtttttccattaactttagcagtctctaaagtttgaacaagataattattgaaatccttatgccattcagcaaaccaaattccagcttctttaacttttttagcgtcgaaagtgtctatcttgcaaactagttcacttccatctttttttaagacagtaatttcagtaagattacctttttcagtatatttattttcttgagttttataatttgtatttatggttaagcacctctttcatgatttaatgtttattaatatatgtgaatgacaatctaatttgaaaaataacacaaaataagttatttttcaaggttttgtatatattatgacacatatataattaatttaaacattacatcattataccagattaaaaatataaaagatatacacctataaaaaaagcgcgaagcgcaaccaaaaacatattattaattaaaaaagtgttagtaatatgtaataagaacaactgataaaaaagtacgcaccttataaaaaagcgcgaagcgcaaccaagatcattaaaattagaaaagagcacttaccttataaaaaagagagcaataaaaaacatattatcaataaaaaatgtcatttatgtataataagaacaactaataaaaaagtacacaccttagaaaaaagcgcgaagcgcaaccaagatcatttaaaattagaagaaagcacccactttagaaaaaagcacgcacatatgaaaagagtgcgaagcacaatttggaacttattaagagcaaccaagatcattaaattatatttcattgtgtatgcccacaaaatcttaaaaaatattaaatatatggtagacgtagctgagtaaactaaagtaaaatagaatttgatattaagaaagcgcagataatgaggtactaaatatgataataactgagactttaaaaaacattttggaagataagaaatttatacacaaagctatatctattacagtacctataacattacaagctctgttaaacacaagcttgaatcttgtggatactgtaatgattggaagtttaggtcagagttcaattgcagcagttggccttgcaaataaagtattttttgtttttacattactattatttggcattgttagtgggtcttcgattttaacagcccaatattttggcaaaaatgatataaaaaatataagaagagtattaggtatgtctctgattattggcttagttggatcaattatttttgtaataccgagtttaatatgtcctgaaatagttatgagtatttttacaccaaatgaaaatacgataaaaataggtgcatcgtatttagctatagctgccattagttatcctttaactgcagttacaaatgtttatgtagcacttttgagaggggtaaatcaggtaaaagctcctgttgtcataacagtgttttctatttgtattaaagtaatgctaaattatactttaatatttggacattttggtgtaccagctcttggggtacaaggagaagctattgcaactataatagctagaacaattgaatgcacatgtattttagctatagtatattatgaaaaaggacccgcagccgcaaaatttaaagaacttatatcttttaataagaattttacaaaattatatgcttcaactgtatctccagttataattaatgaatttatgtggggattaggagtaacaatgtattctttagtatatggaagaatgggagacggagctgttgcagcaatcacaataacccaaacagttgaacaaataatgacagttgtatttcaggggataagtgcagcaactgcggttatattgggaaatgaattaggtgctaataaattggatgatgcagaaagtcatgcaaagtattttataatactacagtttatttttgctttaataatgtctgcaacatgcttgtttattagaagtccaataattatgctatttaatgtaactgaaagtgtagcagtagatattagcagatgcctaatagttttttcgtgctatttaccatttaagatatttaattgggtaaatattgttggtatacttagaagtggtggcgacactaaagctgcattaatgctagatattactggagtttggttagttggcataccgtttgcctatttaggtggaatgttacttgaacttcagatatatttcgtatatgcaatggttacatttgaagaagtatataaatttatacttgggtttaggagatataagcaaagaatatggcttaaaaatttagtttagaattggggaggattttaaaatagaagatgaagtctatttttagaattctccctgtctattctaaaaaggaaatatttagaaaaataaaagtaaattgtataaatatggaattcttaatttttttgtaacctctcagaggattatttcctatataataggagataatgaaaatattaaataaatatagatttcggaggaatatatggataaacaaacaaaccataagccaagaaaaaaaacgcacaaaagaaagaaaagaaaatctaattcgagagtacttttaaagggattattggatatgtttatctttttagctataacaacaccattggtattgttctttggaccatatgataatacgagaaaaacatttatatcaacagtcctagcaacaaggcatgcatatttaataaatgatataattccacagtcagcattaaataaacttcttggaatagatgaagagagtgatagtcaagaagtttttcaagatatgaaaaaaataaatgttaaatataaagttggaaatgaaataaatagatatgatatacatactcagagatttgatggatatgtgttagaagtgaagaatccattaaaaatgaaggttgcaatgactaagtttttaggtaaaatgggtgaaaagacaagtcagatggcggaagataataatgctgttgcagctattaatggtggatcatttattgataaatcaactgatggaactgcttatgcaggtactggatctgaacctggtggatttgtaatatcaggcggaaatgttatttatccaaagtctggtgcagatgagaaaaaagttgaaaatgtaattgcatttacaaaaagtggagaactagtagtcggagatcatagtttggctgatttaaaaaagatgaatgtacaggaagctatgtgttttagaagacctaatattgtaattaatgggattagacaagtgaaaaataaaatggaagatgggcttaatcctagaactgcagttggtcagaaacaagatggaactataattctattagttatagatggcagaaagataacgtcaccgggagcaagtttatatgatgttcaagagataatgatggaaagaggtgctgttaatgcaggtgctcttgatggaggatattcttcaactatgtattataaaggaaatgttataaattctcctaatgcttgggatggtgaaagaaccgttgctacagcattttatgtggaacagtaaaagggggataagtgatgagaaatattaaaagaagattagcatggtgcgcgcttgctctaatattacagcaatgcatatttttatattttgataaagtatatttggcatctgatcttaatataaaagctgaagaagttaaagatgaggataatgtggctgataagaaaacagagatcaatataaaaaagggagtaagtgaaattaaagtatcttcagatgcaagatatgtatcatatatagaagacggtaagcttaaaacattagatagcaatgatgataaggaaaaagtatgtgatacagatagtggatcagaaattgtattctatagatggcttaatagtgaagataatatgataataattcaaaagataaaggaaaaaggtgcgtactattttgagcctatatcttttgatgctaaaaaaggggaagcaagggatcttgcagactttgatttaaaaaaggttagaattaagcttgagagtacaaaggatgaaattaataatgttgtattttcaacattaactcatagtttatatatagaagtgaagaagagtagtggaaaatgtgatttgtattacgcaaacgtaatgaatcagttgaagaaggttaaaagtgaaaaagttataggaaatgttgtagtaccaacaactagcactaatgctataatggaggaaaataacaatataactatattaaatacaaaaggaaatgtattaatacctaatgttaaaagtgcaaaaatattaggagctgatgttaatgataatgtgtattttggcgaagtagcagacaacaaaattaaaaatatatattacagcgtgttatctgatagtaagaggaaatggaatcaattaaaacttgcgaaacctgttgataaaaatgatatattaatcgattattcaggtaaagtttatgttaatagtaaatcagataatagtgtattagaattaacaagcaataaaaacataaaatataaaggggaattggttcaatcatattctaaaggaataatttctagagatggcaatacattaattaaaaataagttggaataaaataatatgaataagttaaaaaaaaatagataaactatacattgatgaaaagaagatcttcataaaaaggaagatcttgtttttttacataaaatcaatggaggaatgaaaatgtctaaaataggagtagtgagtgcaatattagagcatccaaaggaagtgcaagatgaatttaatgatgtagtagcatcatttagaggaagcataaaaggaaggatggggataccttttgctgatgagttatcagttatatctatagctcttacaggggaatcagaagaaacaataaatgattttacagagcagcttgaccgtattgatggtgtatcagtgaaaacttcaatagcaaagattgaagtctagcaggaaaagaaatatttgaaaataaagtctgtatttaaaaatataaagaatgcatacctgacgcctttaaaaagtgctaggtatgcattaattttatcgtaacataaattttacagttatattttaaaataaatgctataatatataagttctaatcaatataatttattctctacgaagttatttcagttataatattacttaatggtttaaggtaaacttctatgaaggagatttttagaaaatacataagtttataggaagaggcggtgttttatgaatccgatagcatttcaaattggtacctatgaaattaggtggtatggtatattaatagctcttggagtaatagtagctatactattagcaaactataattgtaaaaagaaaggaatagactttgacataatattagattgcttttttattgcctttcctattgcaattattggtgcaagagcatattatgtaatatttgaatttgaaaattataaaaacaatttgatagatatttttaacattagaaaaggtggattagctattcatggaggattaattggtgggtttattgctacatatgtattctttaaaataaagaaattaaatatgctaaaatacttagatctagcagcaccatcaattattttggcccaagcaattgggagatggggaaattttatgaatggagaggcgcatggtggagaagtttcacattcatttataatccattttccaagctttatacagaaaggtatgtatattgaaggcagttattacaatccaacatttttatatgaatcaatttggaacattgtggtttgtttgattttgctattaattctatataaaaagaaaaataatgaggatggtgttgtagtagcaagctatataactctatattctttaggaagggtatttatagaaggattaagaacagacagcttaatgtttggtaatataagaattgcacaatttataagtattattggaatggtattaggaatagtgattgtactatacattaaaagaaaaaaagctaaaaatttaacttaagcctaaaattaagtatattataaaactaataaatttagagttataatatacttaatgcagctataaggaagattatttaaattaaaatttaagaagcaaacatatcaatgcgtatcacttttttagatgtatatctaaagtaattatatccatcaatccagtatttaataagtttaggtttataacttaaaacatgttttaagaaatcctcaaaaacatttaactttactaaaactttaataatctccttaggataaggagtcttttttacaaaaacctttcttggatctataacttgaatttgctcatttttgttaacaaatatatgggcatctcttatatcaagtcttgtaaattttaaagttttaaactcttctataagatttattatttcgatagatagattataagataatccattcttttttatataagaacttagattatcaccttcaacataatctcttaaaatcatgttgttagcaataaataatactttcggaaagaatctactgccattaactttttcaagcagatcagcttcgtttttagctttctttttattataaaatatctttaaggcatacccttctggcgttaaataaacagcaccttccttgcctttccctaaaaattcacactctttaacatctaaaatgtatctcatcttatcactttaattaattactttagatattatatgctgaaactatttagaattctacatttctataaatttgttctagatatcttcataaaatcttcatattaattttgtaatatagattatgaaaattagataaattatatggaggaaataattatgaatatgacacattacatgtcactattagcagataatcaaccttggaatttaattatttttatggcaataccagttatatgtgcggaaacacttacaattactgaatttttcattattttcaacaatgtacaaaagggtgggttaagaactttaaataaggttgttggtatatttgatgggatttattttacaggaatattcatttatctattagtaaatgctgtaatccctctaacaaatactggtggatggcatacttgggttgacgtgttggcagttggtttttatttaagcggcgttatcttccttttgccgatcgctctaatggaactagggttaatctttaagaatagaacatcaagggaaaaagcaaaaattcattttatacttattggaggatttctagttgttgcacatattgcaatgatatttggaatggttaatcctgaaataataaataatatgtcaaacatgtcgcaaatgcctggaatgtaaaatgaatgtagtaagttaagataattgcattttttgttataataagataaattgtctttacattagcatttccaaaatgtataattgatttgtattttgtaaatactatataaaatataaatatagagaagtgcaatgaaaaagaagagtaaatagaattttaattataagagatctagggatggtgtaatcctagaatttaaaactattgaaggaagcttttgagtaataaatagaaagcataaggtatatgtcttaaagcgtagtatatttatggggttattcccttaaagataattaagagggttaaatcaaacgtatttgaaatttaaaattagtatgtttaaattaatcaatttaggtggtaacgcggaagtcagcctttcgtcctaagtatattttaggatgaagggcttttttgtatttaacttagaaaggactatatattatatggatattaatatttcatggtacaaagaagaacaaattaatagaactataaaaaatttaaggcaacgcaacatagatggtttctttgtaaatgatgataatgaattaaaagtacttttaaagcaactcatagatgataattctgttgtaggggttggtgattctatgacgctgtttgaaactggtattatagaatttcttcgtgagggaaattatacatttttagataagtatagagaaggtattacaagcgaagaaaagaaaggtatttatatacaaaacttttctgctgatatttttatgtgtagtacaaatgccctgactgaaagtggagaactatacaatattgatggtaatggaagtagagttgcaccaatgatttatggcccgaagcaggttattttaataactggaacaaataaaattgttaaagatatagaagaagcagaaaaaagagttagaaattatgctgctccgattgatgcaaaaagattaggtaaagatactccatgtactaaattagggtattgtgtggattgtaaaagtcctaatagaatatgcaatgattttacaattatcagaggacaatttgttaaaggtaggataaaagtaataattgtaggaaaacaattaggatattaatattctgtagtgttattaaattgtggtaattaaataatttgaatttattctacatatttatgtgtagtttatccgatagctagcatccgtaatacacacacttctttaagcggggaataatggctgcacgctcctggacattgtgcccttcatgggtataagttcaactaggattcagatggggatcaaaccctacctgaatcaagtttcatttgatataaattgccatgacaaggggcttataataccttgtaaggaagaatgataaggagagatacaaataatgagttttgaaaaattagcagatataatatttgggaatgttgaacatacaactgaatattacgttgaaaaatatccaaagagaagtcttaaggaaggtgcaagagttactagatatgcaccaagtccaactggattccaacatataggtggagtttttgctgcattaataaatgaaagattagcaagccaaagtgaaggtgttttttatttgagaatagaagatactgatcaaaagagagaagtcgaaggtgcaatagaagatactatagcaactatgcataactttggtatggattttagtgaaggtatgacaggagaagaaacatctaaaggtgaatacggtccatacagacaaagtcaaagagctgaaatatataatacatttgcaaaagatttacttataaaaggtttagcttatccagatttctgtactccagaagaattagcacagcttagagaaagacaaatagccaataaaataactcctggttactatggagaatacgctaagtttagaaatataactgaagaagaagcaataaagagaattgaaaacggagaaaaatatattataagattaaaatctccaggaaatcctgaaaagagagttgagttccacgatctaataaaaggagatatatcatttccagaaaataatcaagatgtagtacttattaaaggggatgggcttccaacatatcattttgctcatgcaatagacgattatttaatgagaacaacagatgtaataagaggagaagaatggttatcatcacttcctatacacgttcaattatttgaagttttaggttttgaagcaccaagatatgctcatattccaacaataatgaagcaagatggtggatcaaaaagaaagctttctaagagaaaggatgcagaagctgctgtttcttactacaaagaagttggattcccagtagtaactgtaatagaatatttacttaacatagttaactctacttacgaagaatggagagctgaaaatcctaaggctgattatcatgaatttgaagttcatttagaaaagatgggtaagagtggagcattatttgatttagttaaattaaacgatgtatcaaaagatagaattgctgctatgaaagctactgatgtttatgaatattatacagcatgggctaaggaatttgatgcagaaatgtataaattagttacagaaaatgaaactatggcaaaggaaatcttcaatatagataaagaaggtccaaaaccaagaaaagattttgcaaaatgggatgaagtaaaagataagattttctatttctttgatgaactattttataaggaatcagcagaacaaattgaacttccaaagggagttacattagaagcagcaaaagaaatagtagaaacttacaagaaagaatttaaatttgatgtagaaagtcaagaagcttggtttgatgacttaaaggaaataggaattagacttggctattgcgctaatagaaaagaatttaaggcaaatccagatcaatataaaggtatgatttcggatgttgcaggagcagttagagcggcattaactcatagaactaattcacctgacatttatactataatgcaaatcataggtgaagaaaatacaagaaacagatttgataaatttttaaatatataaaccataagcaaaaggcataggttggatgtgctcaaaacactatgcctttttaattttatgggaaagtttgaacttaattcatttaaacttgaaatgcattaactgcatctctaagcttttctgcaagtttatttaagtcttgagtatgtttagctatttgatttacacttgctagttgctgctcagttgtagcagaaatttgttcagtggcagcagagctttcttcagttgaagcagaaagagtctctaaaacttcaactatttcatttttctcgttttccatttcaaggctataagtttttaggtttttcatatcgcttgtaatcttttctacagactttaatatttcaacaaatatgtccttagcttctattacagaattattttgttccttagctattaactttccatcttcgatggcttttacagcagcttttgatttatcttggattccattgattaattctttaacttttgaagcagacattgaagattgagaggccaattttctaacttcttcagcaactacagcaaagccttttccttgctcaccagctcttgcagcttctatagcagcatttaaagataataaatttgtttgttcagaaatctgacttattgcctcagtaatagatccaatttcaatagaagttttatctacttccattattatggcactagttttttcagtggctttgctattttcaattgatttttttgaaagtaaatcaattgcttctaaacctctgttgcttatattagttgttttaagtgcaatatcattagtttctatcgttagtcttgtaactaaatctatcttttctgataaatttttaacccttataactccattttcagtttctttagcctgttcatttgaacctttagcaatctcttcaacggaatcggatacttcattaatagaagctgtattttcagaaacaatttcatctaacaatttagaagaatcaaaaacaacattaattgaatctttaactgaacttataaaatcgttaacatttttaaccattatattaaaggaattatttagattaccaatttcatctctatttttgattttaatggctttaatattcaagttacctgaagctacagtatctacagcgttactaatttctttaattggagtagatatgtgttttgcaaatatcataattactgcagaacctaaaataattactgacaataatataatcagagtagtaataagaatattatttgaaccaacattaaaatcattcatgtaagtaccagcgcaaactacccatccccaatgaggatcagtcttttgataagttattttgtctgaaatcttatctgaattaggaagtgtccaccaataagttagataacctccgccatcattggctactttaatttgatctttaacgaataatgtaccagtctttttatccttataatctagcacgcttttgccttctaaacttggatgagctgcttcaactccatcttgagtataagctaacaaataaccacttttacctaagcttaaattttgattgatttttcttgtaccatccgcttgtttttcgctaagcatatattctctaactctttcttgagcgtcatcaagagatagttttccttgatctacaagcttttgatttgcatcaatcacttgtaatgtcatttctacactattttttaataaaatcttcccactattttcaagttcagcttttgccacataataacttactaatccgagtacaagtacaggtatactcagcaataaaatcattactaaaataagttttgtttttataggtaagccttttgtcttttttgtagattttgtaatcatttgcattccccctaatatataaacttactctattatcgaaatgtaatttatcaacttaatagtaaatgttaccttttatcgaaatatagaaaattaggtggaatttatggtttggttatgatgacaatggtgaagaatttttaaggagtatgaaaaattttgatcagatagttttgtataaaattatctgaattaggagattaaaaataaattaaggcagagaaatctaatatataagatttctctgccttaatttatttttattattagcttaatttaaatgatgattttaatggtactattctattaaatactaacttatcagcagttgtatatttagtatctacattaaagaaaccatttctaaccatttggaatttatcttgaggtttagcatctttaaatgcagttggttcaataaaaccttgtaatatttctaatgagtttggattaatttgttcaaggaagtgttttccttcattttctggtgcatcatctaaaattaaaggctcatataacctgaattcagcaggaagacaagtttttgcatctacccaatggattgttcctttaacttttctcccggtaaagccagaaccactctttgtttctggatcataagtacaatgaatttctactacttcaccattttcatccttgatcacttcgttacatctaacaaagtatgctccttttagtctaacttcattaccaggaaataatctgaagtatttctttggtggattttccataaagtcttctttttcaatatatagttccctagagaatggaacaagtcttgtaccttgagtttcatcttttgcattattctctattgaaagcatttctgtctcattttcaggataattagttattacaagctttaaaggatttaacacagccatagacaatggcgccttaagttgtaaatcctctcttataaaataatctagcatttgggaatcaacaacagaattagccttagcaacaccgatagcactgcagaaatttcttagcgcatcaggagtacatccttttcttctaagtccagagatagtaggcattctaggatcatcccatccatcaacaactttttcatcaactaattgttttaattttcttttactcataacagtattagtcatatttaatcttgcaaattctatttgccttggggaagcggtcatttcacattctcttactacccagtcataaagtggtctgtgatcttcaaactctaaagtacaaatagagtgtgtaacatgttcaatagcatcttctaatggatgagcaaaatcgtacattgggtatatgcaccatttatcaccagtattgtgatgagtagaatgagatattctatatataacaggatctctcatatttatatttggtgatgccatgtctattttagctctaagaactttttcgccgtcagcaaattcaccatttttcattctttcaaataaatctaaattttcttcaacggatctatttctataagggctgtctttaccaggctgagttagtgtacctttatattctttggcttcttcagctgttaagtcacaaacataagctttacctttttttattagtagaacagctctattgtacatttcgtcaaaataattagatgcaaagaaaagttcatcccaatgaccaccaagccattttacatcttctttaattgattcaacatattctgtatcttctttaacagggttagtatcatcaaatcttaaatgagtttttcctttaaactcatcagctaaaccaaaatttaaaagaattgatttagcgtggcctatatgtaagtaaccgttaggttctggtggaaaacgagtaattatctctttatgctttccgctttctagatcttctacaacgatatttcttataaaattagaagaatttatttcgtttgacatagttttacctcacttataagtgtatttaaattaagaaaagaacatttacttgaagtagtattccctcttaactatattgttatttttgcttaataataattttaatctaatataaagaaaaaataaagataaaattatttaaattgcctaaagttgctaaacatgagccgtaataaaatatatttttaattctattattatacataattaaattttacagaagttaagtctgacttagcgatgcattatttgaataataatattaatagtgagaatttataaaaggtataaataaattttgaggaatataagataaactatgaaggaattgaataataattatgatttaaattaaaaaatgaattgaatatttcattaaattgatgtaaactgactattagttgaaagattagcttatagtcagctttgcacacgtgaaactaatatttaagttaatgggattatgataggttatttggcctataattccaaaaaattgagaaatgtaaaggagaagtatgaagaaattattagcacttataattagaatgacattcggatttttattatgctcactaggaactgttttggctcttaattcgaatttaggcttaagtccatgggacgtatttcaccaaggattaacaaatgtaactagtttaactattggacaggcaagcattatagttggaataataatagtagcaatcacaagtattttagggcttaaagttgggatgggaactatagcgaatatgatagtgattggatgttttatggatttaataatacattctaaaatcattccagtttgtaataacatatatacaggcataataatgttaattggaagcttatttgttacagctttaggaagctatttgtatattggatgtgaaatgggatgtggtcctagggatggtcttatgattgcattagttaagcgtacaggtaaaccaatcggaataataagactatttatagaagcaggagccctaattattggatggattctaggcgggtttgtcggtattggaacgttagtcactgccattggaatcggatattgtgtacagttaatttataaagtatttggatttgatataaaggtgctaaagcataggaatataaaagaagggttaaagtttgttaacgaatgtataactatctgttagaattctagtgggattgattttaactgataaacgaagatatataagcaaaaaggtatatccagttttatatattcatatgctatagtaattcaaagtaagtgaaaaattttacgatagtataattatatattatcgtaaaatttttaagggtatatttatgacatttatttaaggtgagaagagtttttatataaatcttctcaccttaattttttagtagactttaataagaaatttatagtatattataactggtcaatataattccaaaactagttattaagttaaatataaacatatacttgaaaattaacataaatatatatataatatacatagcaacaaattaatagttataaaaaacagcgatgataaaaactacgatttataaatttcttcagagagccgatgggtggtgcgaatcggtgaaaggttaaatctttccacttttggagctgtgcgtgataaatgcaaaggttagtaacctatataatactagtgtcgaggggctggttgtaatattaaccagcaatttgggtggcaacgcggattattccgtcccaattatatattgggatggtttttttattttttgaaataataatatatatatttaatcaggagggaaaaaaatgttagacattaaattcgtaagagaaaatccagagattgttaaacaaaacataaaaaataagtttcaagataataagttggggttagtagatgaagtattaactttagatattgaacttagaaaagttaagcaagaagtagaagctttaagagctgatagaaataagttatcaaaacaaattggtggcttaatggctcaaggtaaaaaagaagaagctgaggaaataaagaaaaaagttaatgcggattcagaaagaatggctgagttagacgttaaagaaaaagaactagaagaaaaagttaaagttatcatgatgactattccaaacataatagatccaagtgttccaattggtaaagatgatagcgaaaatgtagaagtagaaaagtttggggaaccagttgttccagatttcgaaattccataccatacagatattatggaaaaattaagtggtattgatttagatagtgctagaaaggtagctggtaatggtttctattacttaatgggaaatatagctagacttcactcagctgtaatatcttatgcaagagattttatgataaatagaggatttacatattgtattccaccttttatgattcgtagccaggttgtaactggagttatgagttttgctgaaatggacgctatgatgtacaaaattgaaggtgaagatttatacttaataggaacaagtgaacattctatgattggtaaatttatagatacaatattaccagaaacttcacttcctcaaactttgactagttactcaccttgctttagaaaagaaaaaggggcacatggtatagaagaaagaggagtatacagaattcatcaatttgaaaagcaagaaatggttgttgtatgtaagccagaagacagcatggcttggtatgataaaatgtggaaagatacagtagatttattccgttctttagatataccagtaaggactttagaatgttgttcaggtgatttagcagatttaaaagtaaaatcagtagacgtagaagcatggtctccaagacaaaaaaaatacttcgaagtaggaagctgctctaatttaggggatgcacaagctcgtcgtttaaaaatccgtgtagatggtaaagatggtaagtactttgcgcatacattgaataatacagtagttgcaccaccaagaatgcttattgcatttttagaaaacaacttaaatgaagatggatctgtaaatattccagttgcattgcaaccatatatgggcggtatgacagtaattaaataaagtaaaatagatcagatatatctaaatttagaaagacaacaaattaaagaggtattaagctcattaatttgctgtctttttcatacagtaaaatattattaaatattttcaataatattttgggtagtgaattaagatattatacatagtagtgattaagaattataagaacggtttacataatattactttagtataaaacaaaaattctaaagaaattgaaatatatacatataaaagcaaaagttactgataatgtgatataaatcacgctaaaaattcagcacaatggttataatattatcatctaagaagaagtttagataatgatattaagggaggaattaattatgtcaagttttgctgttagtatagatgttagaatttatgaaagaggtcataaaaaggagattatatttaaagcctttgaagagcttgaacaaggtgaaacaatggagcttataaatgatcacgatcctcgtccactttatcagcagtttatagttaactttccagaacactttgagtggaaatatttagagcagggacctgaaatatggagaataggtatcacaaagaaataaggcacattcaataagagagaaaaggagttgtttttataatatgccatttataagtcaagatttataccaatttaatagttatgttgaaccaattaatcttacatttcatcaatatttgttattaggggatgaaccattattagttcatacagggaacgttatgcaggcagaagctttggtgcaagaattaaaagatgtacttaatggcaaagagctaaagtatatttttatttcacattttgaggcggatgaatgtggaggattatcattaatattagaatattttcctaaagctaaaacaatctgctctgaagttacagcgcgtcagttaaatggttttggaataaaagcagaaattattactaagaaagcagaggaaactttaaatactgataattatgaattagagtttataaattatccttctgaaatgcatctttgggatggattattagttatagaaaataaacgtaggatattttttagtagtgatttgatgtttgcgttgggaaaagaaataggcacagtaaaagaatctgattggaatacagaagtaaacagtattaagcaagaacaaataccagacaataataagctggaagatttacaagaaactttaaaaaagttaaagcctgacattatagctacaggccatgggccatgtcttaaactaaaataaaataaaggttatatttaagaaggaaatttgttcttaaatataacctttttattttgaattcaatattgaatattataagaactaatattttataatttaatattttataatttaatattttaaatcttgatttaaatcatattatttgtctttctattttttaagttgcgtaaccattgttacagatttaaacagagtattttagtaatatatatctgtagcacagagctaatatagaaattaaaaaatattaattttattttagtaacgtatgttacagaaatgatactggcaatatagtaaactctaaattgtcaaagttaagagagattaacaagaaattattaattattcatataaaaagaaaaataggaaataggaggacataatatgtcaatgttttgttatcaatgtcaagaaacagctggatgtaagggctgtactaaagtaggggtatgcggtaaggatgagtatgtagcaaaagctcaagacttattaatatatgtaactaaaggactagctatagtaagtaatgaaggaagaaaagttggagttaaggatagtaaagttgataaatatataacagaaaacttatttacaacaattacaaacgctaattttgatagagattctattttagatagagttaaagaaactttaaaattaagagaagaattaaaagctaaagtaattagctctggtggtaaagttggagaagtaaaagtaactggtggtttcttcaagaaaatattcggaatgcaaactacagaaatgattatgccagaagcagctacttggacagctgacaatacaatagaatttgatgaaaaagcagaaaaggttggagttcttgcaactgaaaatgaagatataagaagtttaagagagcttataacttatggattaaaaggattatctgcttacatgaagcatgctatgaacttaaaatacaacaacgaagaagttcacgcatttatggcgaaagcattagctgctacaatagatgattctttaactgttgatgactatgtagctttggcattagaagcaggtaaatttggtgtagacggtatggcattacttgataaagcaaatactgaaagttatggacatccagaaataacaacagtagatattggagttagaactaatccaggaatattaatttcaggacatgatttaagagacttagaaatgttactagagcaaacagaaggaactggagtagatgtttatactcacggagaaatgcttgctggacaatactatccaaaatttaaaaaatatagtcattttgcaggaaactatggtaatgcatggtggaaacaaaaagaagaatttgaaagcttcaatggagtaatccttatgactactaactgtatagttataccaaaggattcttataagaacagattatttacaacaggtgctacaggaatgccaggatgtgctcatatagaagctaaggctgatgggacaaaagatttctctaaagttatagaaatggccaagaaatgtaaagctcctacagaaatagaaaaaggacaaatagttggtggatttgctcataaccaagttttagctttagcagataaggtggtagatgcagttaaatctggtgctataaagagattctttgtaatggcaggttgtgatggaagagctaaatcaagaaactactacacagaatttgcagaaaaattaccaaaagatacagttatcttaactgcaggttgtgcaaaatataaatacaacaaattaaacttaggtgatattggtggaatcccaagagtattagatgcaggacaatgtaatgactcatattcattagttgtaatagcactaaagcttcaagaagtatttggattaaagagtgtaaatgaattacctatttcatacaacatagcttggtatgaacaaaaagctgtaatagtattattatcattattacacttaggtgttaagaacattcacttaggaccaacacttccagcattcctttcgccaaatgttgctaaagtattagtagataactttggaattggtggaatcactaatgtagatgatgacatgaagatgtttatggaagcataaaaataatttatggcaaattacaatggcaaataaaataagttcgatcaaataaggaaacaccctatttaataatctacaatatatttaaagtatataatcctagtagcatgattgctgctaggattttttttattctttaggaatttatattacaataaaatctgtggacgaggtactccttgagggtataacttaaaaaaggttgattgactagtttttgtattttaaaaagaataaaaaagaaatcttattcgcctgcataaaatgttcttatatgcagcagagctaccatttctgatgtgcagatttttctcacatgcgttcgaaaaggcagatgcgtgaaaaaatctccgactccacagtcgcctgcgattttgttctgcttttaaaagaatttattttaatttttaatatccttttaaggctgatgcagatattcagcgatctattttcagtaatatagagaaattttaatatttttttatatttataggtttatataaaaatataaaaatataaaaatatgaagatatataaaaaggaatatatttttatatattcctataaacatttttttctatataaatatgaaaatatataaatatttataggaaacatcaggggtaagagagtagagaagattaaataatagagaaactacttagtgactgcgtaaaatgaacttttaatatttaaagcaattttgagagcctaaatagtgttaagtattatgcaaaaaatcttatcataaattattttttaaatattcataaagacaaaaaaccatagataaacctatcatacaataagtttatctacagtccttaaataaagaaaataacaatcaaaccttattgcaacagactaacataattgcaattttcgcgtaaccctacaataactaatcaattatagaaaactctaactataggattgcatctttatttctcaagttaagtcttttgactctatattgagaaggcatattcattcttgaatatttaatgcttaactgctaacttctttataatcttaatgtgcccctaattatgtagtcaatactatgaagttaatagttatactggaaatttatcttaataaatttatcaaatggtagattattttttacacataaaatttataagtttatgttaatttattaaatacatgataatgcaatattagttgaaagagaagcatatggagtttattcaaatatatttataaaagtacacagaaaaatttctgtacttttttatatcctcataaaatcttcataactttatattataatctatatatgtaatttgagttatgatttaaaatgcatcactgtctataataagcagcgatttattaggaggagattatgggtattaagagggagaatattaaagtttatgatatgacatgtacgtcttgtgaaaatagagtggaaagagctttaatgaaaattgatggagtcttaaatgctatggctagctatagtgcgcagcaggtaacggttgaatatgatagcaatcgttgcagtatggaacaattaaaagaagccattaataaggccggttatagtacaaaaaattcggttggcttaaaatttgctggctttttagttatagcggcagcagtcttacttcttggcaattcaacagcaggatttgatatgagtgctaagctgaataatgcttcttatgtggtgttatttattgttggaatgcttacatctatacattgtgttggcatgtgcggtggaataatgcttacacaaagtttatctaaaaatagtattatagatgaaaaagagaataaatttaaagctttaaagccttcaattttatataatgctggaagagtaacctcatatacaattataggcggcattgtaggtgcattaggctctgttttatctctatcacttaatgtaaaagctggattgcaaatatttgcaggattatttatggtaataatgggattaaatatgacaggcttttctttatttagaaagcttaatattaagctgccatggtcatcttgcaaaattaaaaataaacctaaggctccgtttttagttgggatgttaaatgggttaatgccatgcggtccacttcagacaatgcagctttatgcattaggtactggtagtgccatgaatggagcaatatcaatgtttttattttcactcggaacagttcctttgatgcttatatttggcgctgtatcgggtttgttaagcaagggatatacgaaacaacttttaaaatttagtggaattttagtggtagtacttggattaataatgggtaataggggattagctcttgctggagttggaattccaaatgctagtacattagcacaaaatctttctggagatggagctcaagccgcacaagccaacataggtaaggcgacgatagaaaatggagttcaagtaattagaatgacggcagataataatggatatactcctaatgcattttacgtacaaaaagatatgccagttaagtggataattacaggaaatcaaataaattcttgtaataatgcagtggtagtaccatcactgaacatccaaaaaacattaaaatctggagaaaatgttatagaatttacacctaaagacggggacataaactttagctgttggatgggaatgataagagggataattaaagttacagataatcttgattcagtggatacatcgaaagcagattcatcaattccggctcctagtagtggtatgagttgctgtacaggaacatcagcaagtaatactcctcaagctccaagtatatatggtaatgatttaagtaaagtttctactgataggttaattaaaaaagctagtatttcaggagatacccaaaatctaagtataaagggaactggttatgaatttgaaccacttgtagcagtgctgcaaaaaggcataaagactaagctttccgtagatcttaattcctttgataaggctgatggagttttcataatatataatgcagatagtggagatgaggtaactacttttacaggtagaaaagatgtagtaaatgtggaatttaatatagacaagagtggaacatatctaattgtaaaagataatgtagttgcaatgggaatagaagttacagactcattaaaaactgtaaatttagatgaagttcgtaagaaacttataaatgaataaagaataaatgagaattaggtctggtatatagcaagttaatgtatatcagccttttttcgtttagttaagatatgtattaaagatatttattataagcagataatatatgttgcaattcacaatgcacatttcacaattacagctaaaattcttgcaatatttttagaattatgatgaagaattgtttttgcaatatatatataataaaaaataaagaatttcacaaaatcgacacaattatgatgtattattatttaacaattaggtaaatgaagtttataaaaggtattattgttcataattaaagatataagtaagtaactatgatttaaggaggttttttatgagaagtaagttagctaaatttataataattgcagcttcaatatttacattagtttctatttcagattacttacctagaaataatggcatgaatagtacgagtaatagtgtaagcaattttgtaaaatcactaagaagcggtgatttagatagccttctaagtagtgtgaaagatataataagtgttgataaaaataataataataaatataacttagtgtcaccaaaagatctagaacaatacattttagatggaattggtgatataaaagggattaaaataatcaatgagcctaaaattataaaaataataaaaccgatacagaagactccggtaaaaagtgattttagattaggagagataaatgaaaatactaataaagctgtaaatgatcctggatataagtatgagtgggatataagctatacagaggcggataaagcatggcctctaataaaacaaaaaagagaaattaatgtagcggttttagatacaggagtagattacacacatccagatttaaaaaatagagtattaaagagcaaggggtataattttgtagataataattctgatactatggatgacaatggtcatggtactcatgtatcaggaataatagctgcaaatgctaatgacaatattggtatagcaggaattgatgggacattagatgtaaaaataattccgataaaagtattagatagtaatggggaaggggatataaatgatatagttaagggtattaaatatgctgcagacaacggagctgatataatcaatttgagttttggagctaatgagaagagtaaattaattgcagaagcaataagttatgctaagagtaaaggagtatttgttgtagctgcggctggtaatgataatgaagatagtgataatataagtccagctggagacggagcttttacagtagctgcaatgagttataattataaaaaggcctcgttttctgattatggtaattgtataaaagtttcagcgccaggagtggaaatattaagcacagttccaggtggttacgaagcatgggatggaacaagtatggcagcaccagtagcaacaggaatagcagctatggttaaagcagaagatcctaacttatctccaagtcagattgaagatgttttagatagtactgctaaggatattatgtccaaaggtaaggataagcaatcaggatatggacttatagatgcttataatgctatcaaaaaagtgaagcaattagaaaagtaatataaatgaagttaatgaggatattaatgatgattatgatgtttaaaggtggtaaaaatgaaaagtgctgtgaaagaaatgaagaagttgataataatcctaatacaatagagtaggttacattttttatagataaattatatttaaggaagttaatcaataatttacataatgattagcttctttttttgtttcatgacaaaatataacttgtaatcatattatatattaaaaagttttaggagaaaaattaatgaatgatgctttgaaaagttgcccttttacactaaatactactagaatttgtgctgatgatgaattagatacttctatagaaatatctaaaattggttttaataatatgaaaccaaatgctgtgattttagtcaataaagatgaagtttttgatggaattgcagcaacatccttagttcatttcccaattaatgcatcacttttgtttactgatggtaatagtttaaatgaaaaaactttaggagaaattgagagattatcccctaagggatataatggggtacaagtaattttagtcggtaatatttctaaaaatgtatcttttgcattaaacgatcatggttatagaacaaagcatatatcgggtcgcaattattatgatactgcatgcataatatctaggataagaaaagaatttaataatattcttataatttcaggagaagattattcagaaggaattattgcgggttattggtctgcacatcatggagatcctattctatttgtacaaagaaatagaattcctaattgtactattgatataatcaggaaaatgaatgatatcaatatttatataattggttcaactaaaacaatatcaaaagatgttgaatactatttgtcgggattagataatgttaaaaaggtagacagaattggcggggaaaatccatacgaaatagcagttaatttttctagatataatgatacgaaaactgattttgggtggggacgaaattatagaggaggtcatgcttttacatttggacaacttaatgagccaatgaaaattattgctagtgtagtatttgctcatatgggaaaacatactccgcttcttctaattgaaaaagataagataccggaagtggtaaatagatatattaacttaattaaacctatacagccaaaagaaatgccaaagcctccatttatgcacggttttatattaggggatgtttcaaatataagttataaagcacaaaaaatgattgaaggaatgctttctattgatcagcacatgatgaataatgaaaatatggaaggtatgacggggaaaatgaaagataatgttatgaatgctgataaagaaaatatgataatgaataatggtatgcaagatatgaatgaaaatataaaacatgattctatatatgacaaggattatatatttgaatggaggaatttgggctatagaaaagttaatgtagacgaaatactataattttgggctataaattatcacaatccttcttggttttgaataaaataatatttggaaggagatggtttaaagaatggatgtagaaaaagataactacagagatttaagaggcctatatgataattgcaaaaaatacatgtattaccgagcaactttaataatgacagatggaagtacatttgatggaattattgaaaatgtagatggagataatgtttcagtattggttggtgaagatgtgacagagaaagagaatgaaggaaactctaatcagcaaaggcaatatggaagatatggttataaccctagatttagacgttacagacgtagaaattttccacttgctgctttggcagaagtagctttgttgccttatatcgctccgccagtaccttatccttattatccgtacccttactatccttattagagatatacttaaagaagaagcctaatagataaaatataaaatatataactttgttagaaacaggtgtatttataatattgtgtaggcaattgtttaataagaacaattgccatttgtactaataagcattatgcaggattctacaaatatctatattttcaaaaatcattataaccattagatttatttaaaaaatgagctaaataaatagtttaacgtgaactatttgatgttttctaagtttgccagttattttaaattggataattgtccaacagattgacgttcgactaattctacatctaaagttattttgttgtttgatacagaacccttttctatatactctatgagtagatctacagcttttgttgctttagactctatatcctgagaaatagtagtaagttttggcgtaacataaacggatggtagaagattatcaaaaccaataactgataaatcattaggaacaatttttccatttaatttagcaccttcaattataccaattcccataatatcagccgttgtaaatacagcagtaacatcaaattctttattacatatagacctgcctaaattgataccaacttcgtagttaggttctacgtcgactatgagactttcattaaactcaatattagattctaataaagcatctttatagccttcaagtctttttataatctgaggaattggtataccatctttatgacatggccctgcaaatagaattttcctatgtccattatttataagatagcgagtagctatataaccgcctttataatcatttatacctacacttattatgttatcaatttttgaataactatctagaaataccattggaagtttattttcctttaatattgaatagataagattgtcatagtcaggcattaaaaatatagcaccatccatattccaatttttaagcaatgcagatatatctgaaacatccttaactgagcgaaccattaaatagtatccgttttcacgaactacattttgtataatgccaaataattcactaatataaggatctttaaataaattattaaacgaacctttaatgggaactataattcctataattttagaggatttagctgtcaagcttcgtgcagttagattaggaacataattatatttttgtattatcttttctattttttctatagtgttttttgatacttttgaatgatttccatttattacatttgatactgtcatgatactgacaccagcttcagctgcgatatcttttagtgtaaccataattgcctcctagtttaccgatatactattatgaagataagtgtatatagataatattaatatatattacatattattgcaatgagagcatatgcattaatcataagaattaacgtatgggaaagatacctcatgacctttaagtataagaaaagtaaagtatttagagtaggtttaatcactaggtttacgagatattaaatacttgaataaacaaaagaaaagtactaagaattcttaagttattaaattagctatatataatagtaaatataaaaaatgtagataattgaggtaaaaatgcttatgaaaacgattgacagaaaaaagaaacaatgttaatcttatgatatagtttagcgctaaacataatgactcgaagataggcataataatataaatataaatcatattaatctaaataaatgtatatgaggtgaaaagatatgaggaaaaaagtgttagcagcattacttgcaagtactatggtaattagttctttatcaggctgtggaagtagctcgagtcaagctagttctgattctaaaacatcaactgggaatagtgaagcaattcgcttcgtaaatacgaaaattgagattgacaagccactaaaagaatttgcaaaaaaatatcaagagaaaactggacaagaggtagatattgaatctcttggaggtggagtagatgttaatggacagttaaagaattatttagcagcaggaaatatgccagatatatatgcgtttggaccagattcgtatgtttcatttaaagattatttaacagacttaagtgatcaagaatggataaaagatactgattttgcatttaagggtgatgacggtaaggtgtatggatttccatttgctattgaaggtattggattagtgtataatgcagatatattgaagaaggctgggattgatccaaagactttaacaaacatcaatgcttataaagaagcgttcaaaaaaattgatggaatgaaagatcagctaggtattcaagcggttgcatcagtagcagcagaatcaggacaaatgtactggtcaactggtaatcatatcatgggggcttatttatcagaaggactagatagaaaagataaaaaatatattgatatgttgaataaaggacaattggacgacgatcgttttggggaatttgctgactatgtaaaattattatttgattatgcagacaagactgttttaatatctggtacttacgatgatcagttagcgttatgggcaaagggaaaaactgcttttattactcaaggaaattggatagatccttctttagcaacatatgatgtgaagtttgattgcggaattgcgccaccagcatttactacaaaagataccccaggtattttagcagatgcaccagcttattggggaatttataaagatagtaaaaaaatagatgcgtgcaaagaatttcttaaagcttttgtctctacagaagaaggtcaaaaatgtttgataaaagatagtggaatggtttcaccatttaagacaagcactatggaaccagacttacctttagcaaagagcgagagcaattatattaaaaataatcaaacttatgcatgggattggacacatatgaaagatggtattgcaatgaattctacaggacctgtttttgaattatatgctaaaggccaattagataaagatggatttacaaaagcaatgaagaaagcagtttcagattatatggcaaaataataactgtagtataaattatataggttacttgcaaatagagtaacctatattaattctatttttcgtacatgtgaaatattaaaaggggggaaagcataagcgcaaagtatgggcaattacaacaatgattataataatcattcaagtttaggaggaaaaagcatgaatacaaatataaaaagattgctttcaatcggagtaatgttggttggcattttagctatggcttttgcactatatctagatattatgggtagtaaaaacacgatgcgtggaactatattaattgtaggcgctttattagtaatcttaggcttatatagttttccgactaagaagcatagaatgataattaatatactatttatatttccattgctatttgcattttttgtaactgtgttaataccatttgtatgcggtgttttttattcctttactaactggaatgggattaagtttacggaatttgttggattaggcaattatatcagtatgtttagatctgaggactacgtatattcatttatagtgacttttatttttacagttgttaatatgattcttgtaaattcggcagcgtttgcattagcattattttgtacatcaaaagtaaaaggaaaaaatttttaccgtgcagctttctttataccaaatttaattggtggaattgtgcttggttatgtatggcagtttatctttaataaggtattcacagttgtgataaatggtagcgcctctatgcttacaaatcctaatctagcattgatggcaattctaatagttagcacttggcaatatgcggggtacattatgatgatttatgttacaggattgcaaaatgttcctcaagacattcttgaggcatctagtgtagatggtgcaagtggatggattacattgtttaaaattaagattccaatgattgctaatacgtttacggtttgtatatttttaacattggttaattcatttaaacagtttgatttaaatttagcaataactaatggtgctcctagtagaattctaaatggggatatagtgcaatcaacggagtttttagctcttaatatttataatactgcaatcggtaaaaaccaatacgctcttggacaaactaaggcggttatattctttattatattggcagttgtatcactaactcaggtatatataagtaagaagaaggaggtagaagtataatgaagtcgataaaaacaagaaatgtgattggagaagttattggaattatacttgcccttataattctttcaccatttatcttagtagttttgaattcagcgaaaacaagtgcagatattgtaatcagtcctctttctattcctaataaatgggggcagatgttaacaaactttaaaaatgtcataaacaacgatagtttcaattattggaaatccttttttagttcattatttattacagtcgtttctttaactttattgtctttgttttcatcaatgacagcgtgggtgctttgccgaaataagaaaaaatggtccggatttatttttatgcttcttgtggcagctatggttataccattccaagttgttatgctccctttactttctacatttagaaatatatctaatttcttgggaattcaaatgttgcaaagttatcaaggggtcatatttgcttacctaggatttggtggaagtatgtctgtctttatccttcatggttttataaaaggaattccacgggaattagaagaagcagcatggattgatggctgtagcccagaaggaactttttttagaattatttttcctctactaaagccagttcaaatgacaattttgattttaaatggaatttggatatggaatgattatctattaccatcattaatgcttgggttaaatggtaaaataaaaactcttccagtagcagtaagtgcttttgtaggatcttacgtaaagcaatgggacttaattctttcagctgcatttttagcaatgataccaattatcatcttattcttatttgctcaaaagcaaataattaaaggtatagtagatggtgcaattaagtaagtaataaatttataaaataatagatagtagaagtaaaagatattattaataaaaatcttaagtggattttgggaaataaaatcattttcagaaaatgttgaaacaatggaggtgctagtgtatgggaaaatatcatgaagaaaaaatgaaatttggtaaaatgctaagtcataaaatcgaaaataacgtaattactattagattccaagagaaagctgtttttataaaagtattgaattcgtatataattaatttctttgtgcctttacatagggaggaaagaaattctaaagcagttgaaaatttaaaagatgattatcatgattttcaggttgaaaatataacaaatggaattcagataaccacagaaaaattagtttgcaagatttatgatgaatttaaagtagatatttatgataagagaggaacattgctatgtgcagattatagaggtgaaagtaaaccttttaaaagaagatatggtgattatatgcttgcagaatcagaggggcattctcttagggaagaatctgattacaaggtatatgtttcaaaaagaatggaagaagaaatgtatttctatggttttggagagaagacagggcatttaaataagaaaggatatcattatgtaaattggaatacagataatccaaagccccatggagaaacatttgataggctttataaatcaattccattttttattggattgagcaaagataatgcatttggaatattttttgacaaccactttgagactcattttgacatgggaaaagataattctgaatattattatttcgctgcagttgatgggaatttagattattattttatttatggtccatcagttaaaaatgttattaaaggatatactgaaattactgggaatatgcctttgccacaaatatggactcttggttatcagcaatgcagatggtcttatgactcagaagaaagactcatggaaattgcaagcactcttagagaaaaggatataccttgcgatacattatatttagatatagattatatggatggctatagggtatttacgtgggataatgaaaaatttcagaatccagaagcaatgattaaaaaattaaataacatgggatttaaagtggtaactataatagacccaggagttaaagttgataaaggatataagatctatgacgaagggctcagaaaagggtattttgcaacagacaaatcaggtataacatatgtaaatgaagtttggccaggagatgctgtttatcctgattttttaaattcaaaggttagagattggtggtcaggaaatcaaaagataatgatagattcaggtgtgagtggaatctggaatgacatgaatgaacctgcaagctttagagggccgttaccagatgatgtcatgtttaataatgatggaattatagttaatcataaagaagctcataatgtatatggtcatatgatggctaaggctacttatgatggagtgaagaaagcgactggaaagaggccttttgtagtaacaagagcgtgttatgcgggaactcagaaatactcaactgtatggacaggagataatcaaagtacatgggagcacttaagaatgtcaattccaatgcttatgaatctaggacttagtgggatggctttttgtgggactgatgtaggaggctttggatacgattgtactggggaattattaagtcgatgggttcaagtcggagcatttactccactttttagaaatcattcttctatgggaacaagagatcaggaaccttgggcatttgataaagatactgaggaaatcaataagaagtatataaaattacgatataagctaattccatatatatacgacatgatgtgggagtgtagtaagaatggagcaccacttataaggccgcttttatttaattatcagagtgataaaagtacttatgaaattaatgatgagttcctttgtggagataatattttagttgcaccagttgttgagcaaggattaaaagctagaagtatatatcttccagaaggggagaattggatagattattggacaaaagaagaatataaaggtggacaatatataattaaaaaaactccgttagacctatgtccgatatttattaaaggaggaacattgattccagtagggcaagtacaaaattatattggtgaaaaacaatctaattcattaaccatagaagtttacctatctaatgataactcgaatacagaatataatcactatgctgacgatggagaaagttttaaatatgaattaggagaatttaataattataaaattaaagtagtcaataaggagagagttgaaataaaaattgacttgataaattatagatatgatgacaaatatgaaaatatagaatttatctttcacaatttaaataagaaagctttagtcataaatggagaaacagtggaagttataaatggcaaggcgtttatagctaatccagcaagataaatatattcaatagtaatttaggaggttttacgttatgaagaaatggtggcacgacaaggtagcatatcaaatatatccaaaaagtttttgcgattcaaatggagatggtataggtgatttaaaggggattatcagtaagcttgattatttaaaagacctgggagtggatataatttggctatcaccaatttattgttctcctttagtagatcaaggttatgatatatctgattattataatattgatccaaggtttggaactatggaggatatggatgaacttctaaggcaagcaaaaaaaagaaatatgtatatattaatggatttagtagtcaaccactgctcagataagcatgagtggtttaagaaagcattggatgatccagaaggagaatatgcagattatttctatattcgtgaaggtaaaggtgataatcctccttgtaattggcgctcttactttggcggaagcgtatgggaaaagatacctaataccaataaatattatctgcatttatttgcaaaagagcagccagacttaaattgggaaaatccgaaactaaaaaatgaaatatttaagatggttaactggtggcttgaaaaaggattagcaggtttcagaattgatgccattattaacataaaaaaggatttaagatttcaagactttccagctgatagagaagatggactttgcagtatagatagaatgctagaagcagcagaaggtgtagggaacatgttacatgagttaaaagagaaaaccttcgaaaaatttgatgcatttacagttggagaagtcttcaacagaaaagaaggagaacttgataaatttataggtgaagacggatacttctcttctatcttcgattttgagatggaagtcttgggaaaaagtgaatttggttggtatgataataaacctttctcaattaacgagttaagaaaagctatttttaacagtcaattagagacaagtggagtaggttttaaggctaatattattgaaaatcatgatgagccgagaggggtaagtagatatattcctgaacaaggcttaaatgatagaagcaagaaaatgcttggggcaatatcgcttatgcttagaggaataccgtttatttatcagggacaagagattggaatgacaaataacaaattcaattccataaaagaatttgacgatattgcaacaatagaccaatataatgtagctattgaaaaaggatatagtgatgaagaagcactaaaaattataaatatatttagcagagacaatgctagaacaccgttccagtggagtggaagtgaaaatgcaggctttacaactggcaggccttggcttaaagtcaatgaaaattataaagttattaatgcaaatttacaaattgaagatgaagaatcagtatttaatttttataagaagctgataaatttaagaaagtcagaagaatttaaagatgccatagtatacggagaattcgtaccgacatttgaggaatatgataacttgtttgctttttatagacaaggagaatctaagaaattaatgatacttgcaaattaccaaaaggaagagcaaattattgagttagacaaacaatatgttaaagtgttaatcaataattgtgaagaaataaagaaagataagaataaaatcatattgcaaggatatcaagtacttattcttgaagtttagtaaaggtaatatgcttacggtataaaattgaataaatataatagaattctctccaaaagacctggagagaattctttattgcatactaaaatattaatataaaagtaatataataataaataaaacttaattatttttgtgctataatgaacgggaataaaggaaattaaatttttggacataatttatagcataataatataaggagaatagaaaatatgaaattcaaatcatttatatcaaaagcaattatttcatctttaactttgagtttgttttttacttcagttataggaagacaggcgtttgcagattcatttaaatctgttacgttaggagctgatttaagtgatgctcaaaaggcagaaatgttaaaatattttgaagtaacaaaaagtgatgctaatgtattagaggtaacatcaaaggaagaacattcatatttaggcaaagttgcaacagaagctcaacttggtaataaagcaatatcatgttcttatgtagaaccgactgaaaaaggaggaataaatgttactacaaacaatcttacttgggttaatgacggcatgataaaaaatgcattgattacagcaggagtagaaaatgctaatgtaaaagcatctgcgccatttaaagtgtcaggaactgctgctcttacaggaatattaaaaggctttgaaaacagcagtacaggaaaaaagattgatgaaaataaaaaagaagcagctaatgaagaattggttactacaggagatatcgcagagaagatagggcaaaatgatgctagtaatttaatgaatgacataaaaaaagatgtagtaaaggaaaaaccaaaaacagatgaagaattaaataagatagtagataaagctgttaaagactataaaggcaatttatcagatgatgatatagctaaaattaaagatgtaatgagtaaaataaattcattagaccttaactataataatttaaaagcgcagatggacgatgtaacgaatcaattaaaagataagctaacaagcaaagaagcacaaggtttttttgataagttagaaaaaatgttctctgattttttaagttcaattaaaggtgcattttctaagtaacagattaaaagtttatattagtataatttagttaaagtaagaaaatgtgaattttagttaccattcttgagtattatagtaatatatgatataattattaataagaaataaatgaatatattaagttgtacggttgggcaaattatataatttgctttcaagcaattttggtttctggggtgggaaactctttttgagtattcccatctctttttttgtatagatttttaataaattaatggttaaataagagattaaattaatatcttatttttgctgatttttgggaataaataattatgtgaaggagagtaaagtatgaaaaacaaaattaaaaataaaattaaaaatccattcttgcaattctttaagaatgagtcttcgagtggaatagtgctgatgttttgtgcaattattgcaataataattgcaaattcaaatttttctagtatgtataataatataattcatacttatataactattgggtataaggatttttctttatctatgtcaattttgcattggattaatgatgggttgatggctatattttttttagtagttggaatggagataaaaagagaaatagtatttggagaactcaagtcttttaagaaaactatattgcctgtatcagcagctataggcggaatggtcgtgccagctataatctatgcgctattcaattttaaccaaccgactataataggatggggaattccaatggctacagatattgcgtttgcattaggaatactttctttggttggtaaaaaggcaccaaaaggaataataatttttcttacagcattagctatagttgatgatttgggagctattatagtaattgctatattttatacaagtgaaatttcatggattgcattaatcttaggtttgattatttttttagcgattatcttggctaataaacttaatgttaagaataaatggctatatattatttttggaattgcgttatggatttgtttcttaaaatctggagtacatgagacaattgctggagtattacttggaatgggattacctataggaaaaaatatggaggaatttagaacatcaattttatatagatttgaacatgtcctaacgccattatcttcatttataattatgccaatatttgcattagcgaattcaggcataactatagatattaatagtttatcagcagcaataatgaatccagtcagtctaggtataatttttggattatttataggaaaacaaattggtatttttggggcttcgtatattttagtgaaattaaaaattgcaaaattgccatctaaagtaactaagaggcatttatatggagcaagtgtacttggcggaattggatttactatgtcactttttgtttcatccttgtcatttacagaggaaagtgctttatccatggctaaaataagtattataatcgcctctattttatctgctgcatttggagctgcaatatttaaaataataaaatttaaaaatgaagaacgagtgtagtataaatttcatgaaaaattaaaacttatttttctaagaataaagacaaaggaagaatagttaaagatttgtaatacaagccatctgtgctagttttgttaagatttttataggttatattttgtgatagtggttaagatattactgccaaacaaaatcaaaaatttaagggaggtagatttatatggcttcaaaaaatagtggaacaaacagaacattggtaccagaagcaaagcaaggattaaacagattaaaaacagaggttgcttcagaagttggattaagcaattatgaaagcatggataaaggaaacctttcttcaagacaaaacggtagcgttggtggagaaatggtaaaaagaatgatagaaagctatgaacaaggactatagaagataaataaaagcagatgtactgagtttattctcagtacatctgttatttagattacatacattcaatgtaaaaagcaaaattttactttagcaacgagttcctttattaatgataaatttaatttttaataattatatatattgcaaaaataattcgtcatcataattctaaagatattgtaagaattttagcagtaattgtgaattgtgaaatgagcattgtaaattgcgatatatatgagtatataattttatataacttcggcatagtatgtaaacaataagtattgagcttattgtttttttattctttaggaatttatatttcagtgaaatctgtggatgacttaaaaaggttgattaaatagttttggtattttaaaaagaataaaatctctgtttccacagtcgcctgtgattttttattggaaaggctgaaaattattctcatttctattgacaaaataaagtaatgtcgaatataataaacgtatgaacagatattcatatgttcaaacgaagaggtgaagagtatggaaaataataatattgaagtttgtaactgcactataattcatgaagatataattaataaggttaaggaatctataccagaggaagaaacactttatgatttagcagatttatttaaagtgcttggggattcaacaagaataaaagtattatgtgcattatttgaggctgaaatgtgtgtctgtgatatagcagcattgcttggcatgactcaatctgctatttcacatcaattaagagttttaaaacaagcaagattagtgaaatataaaagaaatggtaaggtagtctactattcactagatgatgaacatgttaaaagtatttttgatcaagggttgattcatatatctgagaaaaaataagttttagattgggggaaacattatggcaagcaatataaaaatagctagtggtcctgttaacgcaaaattatcaaagaaagatagtataaagaaagtaaagaaagaatttatcttagaaggacttggatgtgccaattgtgcagctaaaatagaacaaaaaataaatgaattagatggagttaattttgccaatgtaaattttcttactaaaactttaatattagaaacaaatgaagttaataaattagaagagctgataggagcagtaactaacattgtaactaatattgaatctcatgttaaagttgtagaaaaggtaacagaaaaaattttgaaaaaagaaattttacttgaaggattatgctgtggtaactgtgctgcaaaaatcgaaagggaatcaaataatatagatggtgtgaaatctgcactagtggactttatatcaacaaagcttattatagagatggaagacccagcaaaagaaaatgccattattgataatgttaaacgaattgtcaaaagaatagaaccagatgttaatgttgttgaaattgatggaatagatagaagagctatgagcaagaatgaaaaggttgaagaggataatgataagttggaaattataagattagctattggtgctataatttttggagccgctactatttttaaattttcaaattatatagaattattattatatctaataagctatattcttataggtggagaagtggtcttaagagctctaaaaaatatagctaaaggtcaagtatttgatgagaatttcttgatgactatagcaactattggtgcttttgcaataggcgaatatccagaaggagttgcagttatgcttttctaccaaataggagaaatgtttcaagatatggctgttaatcgctctagaaaatccatcacatcacttatggatataagaccggattttgctaatttaaaaataaataatgatttcaaaaaagtagatccagaagaagttaagcttggagatattatattagttaaaccaggcgaaaaagtgccattagatggtgaaataattgaaggaaactctatggttgatactgctgcattgacaggtgagtctgttcctagagaagtaggggtaggagacagtattttaagtggagtaattaataaaaatggacttttaacaataaaggtagaaaaagaatttggagattctactgttgctaagatactggatttagttcaaaatgcaagtggaaaaaaggctccgacagaaaattttataacaaagtttgctagatattatactcctgctgttgtttttgcagctttagcactagctgtaataccaccaattgttattgagggagcaacattctcacagtggatttatagagcattagcattcttagttgtatcttgtccatgtgcattagttgtatctatacctctaggattttttggaggaataggcggagcatcaaaaaatgggatactcgttaaaggtgggaattaccttgaagcattaaataatgttgaaacagttgtgtttgataaaacaggaactcttacaaaaggaatatttaaagtgacagaaataaggccagaaaataatatttcaaaagatgaactcatagcttgtgcggcttatgcagaaaattactcaaatcatccaatagcaacttctatattaagagcttatgataaagagataattacagataagataacaggttatgaagaaatatcagggcacggcgtaaaagttgttctagatggaaaagaggtatttgctggaaactacaagttaatggataaggagaatatatcttataacaaagtagatgaaataggaactgtagtccatattgctatagaaaagaaatatgcaggttatattgttatttcagatgaagtaaaagaagattcattaaaggctataaaagctttaaaagaaataggtattaagaagacagtaatgcttacaggtgataataaaactgttggaagtaaaattgctaaagaattaggtttggatgaagttcatgctgaactattaccagatcaaaaagtagaagagctagagctattgtttaaggaaaaatcacctagaggcaagatagtatttgttggagatggaataaatgatgcgccagttctagcgagggctgatataggtatagcaatgggcggtgttggctcagatgcagcaattgaagctgctgatgtagttataatgacagatgaaccatcaaaaatagcttcggctataaagattgcaaagaagactagaactatagtaatgcaaaatatagttttcgcattaggtattaaattgataatattggcgcttgtagctgtaggtatgggcactatgtgggaagcggtatttggtgatgttggagttgcattgcttgcagtcttaaatgctatgagagctatgaaagtagataatatatagttatagattggtgtagtcataatattgctatgactacactttttaaatgcaaattttttttgttatgtgactaagtcacacaaatttattaaaaaaaagaatataatacaataaaggagggatgaagtgaataatagaattgaaatatcaagtgggaataggttggaatatataaaatctctatataaggtatatccggtgttatatgagattaataaaaagaataatgaagtaataaacgaacaagctaattttaaaactttatatgctgatgaatatgtagaagctacagagaaagcgtgtaaagggatattatttgttataaaaggtgtaataaaaatacaaaaaattaataagaatggtgaagaaactaacctttataatataagccaaggtgaattttgtcatgaagccttaagctgcttatcagatttggaatcattaaatataacaggtaaggcaattcaagattctaaggtatgcataattccttttgaagtggttaaaaaatattttattagtgataatgacttcttattatatatatataaagatttgtataataagtttaatactatcatagggaataaagaagaaattattcatgaatcccttgaaacaaggcttataaaattgctaataagcaagaaaagcaaaataatttatgcgactcatagtgaattggcttttgaaattgattcagttcgtgaagttataagtagaaagctaaagaatttagaaaagcttgggtatataaaattagaaagaggcaaaataatcatacttaaggatttaaataaaatattaaaagataattagagatgagaaattaggaaagtattttaggaggaagttatagtgtttgaatttttaaaaaaagatgatggaagagttattaatgtaaatgaaattgatgatctaataggaaaagttgaattgattgatataagagaagaatatgagtataaaggtggaagtataaaaagtgcccaaaatattcctatgggagagcttttagatgaaccagagaaatacttaaataaaagcaaagaatactatataatgtgccaatcagggggaagaagtgcaagaacgtgcaacaatctaagaaatcagggtttcaaggttataaatgttgcaggaggaatgggctcttatataggaaacaaaagaaaataaagtacataatactaagtagtattattattattttataaataataattattttgctagattgaggggatataacatgaagaaagttattgaatttcatagagaaggatataattgtgcagaatctatacttaaagcatttaatgaggatacaggatctgaaattccaattgcaatagcaagtccttttggaggaggcatgactattggaagtacatgcggagcaatcactggaactttaatggcggtaggtgcattaaaaggaagaaatagcagtgaagaaaaaaataattcaagagtattaactagagaaattataaataaagttaaagagaagtatggtactcttgagtgtattgagcttaagaaaaaaggtataacttgtgatgaaattatagaatatgcttataatattttgaatgaatatgcaaaatagcatgataaaagaggggattaaaaaatattgtttatttgcttcatgcaaataaataatattttttactataataaaactaatttaaaagattgtactatttatgttttttacccaaaggttcatgtcttcaaaggtaccgcatatattacaattgtttactagtctgccagcaaaatcataattatgcttacttagaacaaagttaatgctaggatttattgatctagataaactatataaacagagaaagcccttagtttttaagtctgattctaaagaataaataatgtttgataatatgcctatgcctctataggatggatgagtagcacagtcagttatttcagcattcaaattttctttattcatatccgctgaagctatgctgattatttttccattatatacggcaactttgtatagaactttatcattcattgtttgttttaaatattcttcatcataaataggtgattgataagttaaaaaaacggtggaaaacaaatctatcatttcttttatatcatttttatttgcgtttcgaataaggtatcctaaattatttttttgatgcgcatatgtgttcctaacattctgacattcttttattaatagttcttttcttgcaaaattgctgcaaacttttctatcgctattaataaagtatgacatacaaaaagcatcgttacctttaaaatatccattgatcttgccttcggaattgaatcccgcattaataaaagtttcaaatgatttagtatcacaattacaaataattttacttaaatgttgttttgatgcaaagtgaattattcttttcaagttttgcattgatatggcattaaagtcaattatttttattcgcttgttaggtaaatctactaatattttagtccgatctatttttgcgtaaaaagtattatttaattcacatctacttgctctcattaaattgctttctccttttatcataatgtattacttgaagttaggaaaaagtttcttaactataagatatttttccagcctcaaaagtttgtcctaagtttaagtttataattataaaaaaataataagctatagagaagtctctatagcttgtaaagcaataatatttataggcatacataaaaaatatcaaagtataccaaaacttctcttctacgcttacgagattagctgacggattcggattgaagaaaattaaccctacttattatcgtgtaataagattcaccccaaaaaatggttctcccgttcaaagtgattaagcgttacatatatcattttgtaattattaatatcttatatataaacatatcatttttaaatatttgagtcaatatatgtataagtcaatgtgcattattatgcaaatataaatattaattaatcaattatatattataaattctcccttttactttatttgtgaaagtgaaataaatttaaatagtataggttcgcatgcattcgcttgtgttttattaatgtgtactaaatgaataaattatattttacggaaatattattagatatagcaatactaaggagtttaatgtgcctagttttaaaaaatgtaatttatattatgctggatttcctaattatttagtgcaatatagaggagattttcagggacaaattgataacatatcatatgcctgtggcgacaaaattactgatacaattgcagtaatctctatagcaccagaagatttaaaccgtttaatgaaggatgttccatcaattctttatataaatcctagaagcaaatacgtactacaagaggtctcgccatcaagtgtagataatatcaatgcaatcaaaattaatccatacttagacttaaatggaagaggcgtgcttataggtatggttgatagcggaatagaatatttaaatgaagaatttataagagaggatgatacttcaagaatagtaagtctctgggatcagacagtaccagattctaccgacacatcagtttatattggaagaacatttagcaatgaagaaattactaatgcaatcaaagcttatagaaataatcaagatccatatctaattgtcccatcaaaggatgaagtgggacatggaacacagatggctggtattattggtgcaagaggatataatgctgatgttcaaggcgttgcatcaggatgcgaatttgtaattgttaagctttttgaatctatcaattttagaaacgagcttcaggcaaatggcattccttatacaccagtatataatgattcagaagttttagcagcaatatattatttgcaaagtgttgcagtaagactgaatagacctatggttatatatctgggtgtaggtacaaccgaaggcagtcatgatggtaataatctgctctcaaggtatttaacttctattggaaaacttagaggtattgttacagttactggtgtcggaaatgaaggagcgtcagaaggtcatacttctggaatcataaaacaaactggggatgtggcttctattgaattaagaatacctagagagatgaaatatttttctttcacaatctggttgataaaatctaatagagcatctataaatgtggtttcgcctaatggagaatcatcaaaatttattaaagcgaaggcaaatgaaatacagaatgttaattttgtattttttaaaactcaaatgactgtaaaatattatgttcctgaatatttcacaggccatgaagccatatcaattagctttgatagcataaaggctggaatatggacctttcagttaaggggagattatataacagatggtagatatcatatatggcttccaccacaaaaaacattgccagaaaacacgagatttcttcaagcagatccatttactacattgacaataccatctacggcgcgaagtgtagtcacaacagcttattatggaaatgacaatgctttggttgcagcatctggaaagggccctaatgttaatacatatgtagaaaacccggatatagctactttgggggcagatatattagcaacgaatataggaggcaagactactactgtttctggcagttcagtagcagctgctataatagcaggagcttgtgcgcttttattgcaatgggggattgttaatggaaatgatagaactatgtttgcagcaaaaattatagcttatttagtgcttggtgcagataggagcaatttggcttatagataccctactagagaaattggatatggattttttgatttactaggtacttttaatataataagcagaagctatagaatggacctaggcctagaaaataagtcaagggaagattgtaaaaaaggggataagtatattgaatacagtgtaaaagcattatttataagaattcctaaagaaatataaatgttaaaaaacaatacatttgtttaaaattgcacattgaaataagaaaatatgtaatataaagaaaaaaatcctattttaccaactaaaaggtactataaatggtatttgatattgtattatatagtgaatagcattgtttggtgctaatacaataatttagggggatataatatgaatagaaatattaaaagaatagttgcattaacaattgcggcaactgcctttagtgcaattgtaccagcaacaagcttaactttaactacaacagcttatgcgtcaacaggtgatttatcaagcattaaattaaagacatcaggcggaagcacaataaagacttatagtgatgataattataaaagtaaaaatgaagttgatgacgatgagttgaaaaataatgaaacttattacgctaagacttcatctagtaaaataaaaataagtgtaaatggcgctgactcaagtaatgttagaatctttaaaggaaaaacaagttctactaaaggtgtaaaaacaagcagtactattgaactatccaaaggatcaacaacagttcttacaataagaacatataacgataatccaggaacggtcaaatacagtgatgattcatattctagtcaatacactattagggtgaagtgtacagcaagttcttctagtgatgatgaagatgataataaagatgtgtatttgaagagcatttcacttagcgatggggatttgagtttttctaaaaatacttctgattatagtgtgaatgtttctggatctgttgatgaaattaaaataaccgcaaagccagattgtgatagcgatgagtatgacgattatgaagtaagaatagatggaagtactgttgatgaaagtgataaatttagaaaaacagtatctttaaataaaggaaagaatgatataaagataactgttaaaaatgatgatgataagagaacatatacattgaacatttatagaggtggaagtagcaataattctaatagcagtggtacacaattgccaactaagaatattaagacaaatcaatgggtacaggtcaatggaagatggcaatacaacgattctatgggtaatccagtaaaaaataattggatacgtaattactacttacaatcagatggaaacatggccacagggtggttaaactatggaggtacatggtattatttaggtggcgacggagcaaaaaaagcaggctggcaattagttaatggtaattggtactatatggattcggaaggaagaatgcaaacaggatggattaaggatgtgtccggaaagtattattacttatatagtaatggagctatggcatacaataccactattggtgggtatagattaggatctaatggtgcttggattaagtagaattcataaaatgcttaatgtaaagtttttatttagaaatattggtatatatatctaactttaaaactagatttatgtgataacttaccgaaatcataaatattttgttccgaaaagctatgcaaatattgctgaaggttctaagcagcaggttgtatccactttagcgtgctccaactttcagtttgacaagctaaaatggaacaacctacagctaagaacctttaacagctcattttcaaatgttttctccacaaatatatttatgatttctaatgaagatatgaacttaaagttttagcaactttatagccttagaatcacccatcagaattacctagaaactggaacaaaagtatgttattcatttcggcgagttatatgcttaagttcaggtcttagttgggttatctataatacagctaattaacatatatatttttaataaatttatgacccatactaatatttataaatattagtatgggtcgcatttttataaatatgataaggccatttaattatatttatattttcataatgaataatttgtactttatctaaatactattaaatataagtaatactaaggagtctgctgtgcctagttttaagaagtgtagtttatattatggaggaatgcctaattatttagttcaatatagaggagattttagaggtcaaatagacaaagtatcttatgcgtgtggagatgtaattactgatactatagcagtcgtatctgcttcaccagaagatttagttagattggctaaggatgtaccatcgattctttacatagatcctagaagtaagtacgtattacaagatatatctccgtcaagtgtagataatataaatgcaattaaaattaatccttacttggacttaaatggtagaggtgtccttataggcatggttgacactggaatagattatttaaatgaagaatttataagggaagatgatacttcaagaataataagtctttgggatcaaactattcctgattctgatgatatctcagtttacataggaaaaacctttaataatgaagagattactaatgcagtcaaggcttatagaaataaacaggatccatatttaattgtaccttcaagagatgaagttgggcatggaactcaaatggccggtatcattggagcaagggggtataatgccgatgttcaagggatagcttctggatgtgagtttgtggttgtaaagctttatgagtccatggaattcagggaagagctcatagcaaatggtattccatatacaccagtatataatgattcagaggtattagcagcaatagattatttaagaaatgcttcagtaagtcttaatagaccaatggttatatatattggagttggaacaacagaaggtagtcatgatggtaataatttaatttcaaggtatatatcatctctaggaaggcttagaggactaattacagttgccggtgttgggaatgagggagcttcagaaggtcatgcttctggaattataaagcaaacgggggatatagtttctattgaattgaggatatcaaaggaaatgaaatatttttcctttacaatttgggtaataaaacctaatagagcatctataaatgtaatttctcctaatggagaatcatctaaattcattaaagcgaaagccaatgaagtacaaaatgttaattttgtattttttaagactcgaatgactgtgaaatattatgttccggaatattttacaggccatgaagcaatagccataaattttgatagcataaaagctggaatatggacattgcagttacgaggagattatataactgatggaagatatcacatttggctgccgcctcagaaaacattaccagagaatacaagatttcttcaagcagatccatttactacactgacagtaccatctacagccaggagagtagctacaatagcttattatggaaatgataatgcgttgatcgcagcgtctggaaaaggtcctaatgttaatgtagaaataaataatcccgatttagcgactttagggatggatgtattaaccacaaaagtaggagggggaactacaactgtttctggtagctcagtagctgctgcaataatttctggagcttgtgcacttttgttgcagtggggaattgttaatggaaatgacaaaactatgttttcggcgaaagttatagcatatttgattttgggtgccgatagaagtaactcgacatatagatatcctaatagggaaattggatatggattttttgatttacttggtacatttaatattattagcagaagttatagaatgaatctagatctaaaagaaaaagatgaagtcagcattggaaaagactgtattgaatatagtgtgagaaatctatttataagacttccgaaaacaaatattgaaatattaaaataaaaaatatgagtatttaattaagaaaattttctttatataataataaagtctcatatcagaacttgcattatttctgaagattttattacaagtttatttagagcttaaccaaatatgtaattaaataattgtgatgttgcaaatcaactctagtcatacttttcatttttaagtaaatactattactgatctaaatttattagaataattttggatagtaaaaggaggtttacacatgacaaataaatttaaagaaaagttcgttggcatgccaatagaaaagcatgatgcagcagcatgggctaatatggaagacgcacaacctgtatctaatgtgaacattcctagcgaagtacaagttagaaatgcaaaagaatatgtagatacaaatcaaaagtaagatctatagtttaagattcagtcaaccgaaatgacaggtactctgttgcttcggttgctatagaatagagttgtgaatttctaacagcaaaagttgtacccatttacgcatgctccttagacgagctaaggacaagcgagaatggaacaacttttgctgaagaaattgctacgactccattctaaatgcaacactgcacaaaagagtacctgccatttctggtgaggaatatattttaaactataaatgtaacttgaaattgaggtatctatagaaaaatccccggaaaatcggggattttttattttggttactatttacatgtatgttatttggagctttttactaatattgcatatcagctaagcgcttataagtttcatatctttcttttgcattcttttctgcttcatcaaataatttatcggctacctctgggaatacgttcattaatgatgagtaacgtatttctccatgtaagaagtctttatatggagcagaaggttcttttgattcaagtaagaatgggtttttaccttcatcttttaataatgggttatatctatatagatgccaatatccagactcaacagctttcttttcttcttttatactgttacccataccaacttttataccatggcttatacatggagcataagctataatgattgatggtcctggatatttttcagcttcagctattaccttaatggcatgattcatgtttgcacccatagctatttgagcaacatacacgtagccatagctcatagccataagtcctaaatctttctttctagttttcttacctgctgctgcgaatttagcaacttgagcagtttgagtagattttgaagcctgccctccagtattagagtagatttctgtgtccattacaaatatgtttacatcatcacccatagcaagcacttgatccactccaccgtagcctatatcgtaagcccatccgtctccaccgagtatccagtgagactttttaactaaataatcttttctttctaatatctcttttgcaatttcattattagaattttttagaacttctaaaactttagaagaagctgtttttgatccgtttccatcattgaagttattaagccaatcgcggaaagcattcttaatctcgtcattaaagtcagatgattctaaaccttcattcattaaatctgctagcttttctcttatttgtttaacacctaggaaaataccatatccaaattcggcattgtcttcaaataatgaatttgcccaagctggaccttttccttcagcatttgtggtataagctatagaaggagcacttgcaccccatatagatgaacatccagttgcattagcgattatcattctttcaccaaaaagttgtgttagaagtcttatatatggagtctctccacatccagggcaagcaccgttgaattctaggagaggtctaactaattggctgccttttaaggtatttctatcaatcaagtcttccttaggtgtaagcttcattgcgtattcccagttttcagcttgctctaatatttgttcttcagccggtttcattataagagctttaccaggagcaggacatacatcagcgcagttgccgcagcctgtgcagtctagaggagctatttgtattctataaccgtagttttctagaccttttccagcagccttctttgtaatgaagtcctcaggagcattcttcatttcgctttcatcaactaagaattggcgtactgtagcatgagggcatatgaatgcacattgaccacattgtatacacttatctgtttgccattcaggaacattaacagctataccacgtttttcataggctgtagttccaagagggaaagtaccatcttccattcctttaaatgtacttgttggtaattcatcaccttcaagtcttgccataggacgttgaatatttttaacaaagtctggttcgtctttaactggtttatcactatctttagcattggcccaagattcaggtatactaatttcgttcaatgaatctactcctctatcaacagcatcatgattcatttttactattttatcaccttttttaccatacaagtgggaaattgaatcttttaaatatttaactgcatcttcaacaggaataacattagcaagtttaaagaatgcagattgcattatcatattaattctatttccaagacctatttcgccagcaatagcaattgcatctatagtatagaatttaatattattttttgccatatatctcttatatgctgcaggtaatttattttcaatttcatccttattccatgggcagttaagtacaaaagttccattattttttagtccctttaacacatcaaaattatagataaaggatttgttgtgacaagcaacataatctgcattataaactaaataaggagattttatagggctctttccaaatcttaaatgggacactgtagtaccaccagattttttactatcataagaaaaatatgcttgagcatataaattcgtattatcacctataattttaacagcactcttatttgctccaactgtaccatctgatcctaacccccagaatttacagcttatagttccttgtggtgtagtatcaattatttctccttcaggcagagaagtgttagtaatatcatcaactataccaacagtgaaattatcttttggcttatctgaatttaaattaccaaaaacagaaataatttgtgatggtcttgtatctttagatgctaaaccatatcttccaccaactatcactggtttgttgtcttcgttatagaaaagcttagtaacgtctaaatataatggctcagcaggtgcgccaggttcttttgttctgtctaatactgctattttcttaacagacttaggtaaaacgttaaagaagtacttatcacagaaaggtctgtataaatgaacctttatcatacctactttttcgcctttttctcttaagtagtctacaacttcgcttatagtgtcacacactgaacctatggctactataactctttcagcttcaggatctccatagtagtcaaatgggtgatattctcttccagtaatattttttaattctttcatgtaattttctactatatcaggcactgcattaaagaaaggattttgtgcttctcttccttggaagtagatatcaggattttgtgctgtacctctggcaactggatgttcaggatttaaagctctatctctgaaagcttttaaagcagctttatctacgagtttagttacttctccaaaatcaggtacctcaattttttggtattcatgtgatgttctaaatccatcaaagaaatgagtaaatggaactcttcctttaattgcacttaaatgggctatacatgctaaatccattacttcttgaacactgcttgatgcaagcatagcaaatccagtctgtctagttgccataacatcttggtgatctccgaaaattgatagagcatgagttgcaatcgcacgagcagttacatgaaatactgcaggcaaaagttctccagcaatcttatacatatttggtatcataagcagcaagccttgtgatgctgtatatgtagtagttagtgcaccagcttgaagtgatccgtgtactgcgccagctgcaccagcttcagattgcatttcagcaaccttaattggttgattaaacatatttttctttccgtgagcagaccattcatcaaccccctcggccataggtgtagaaggagttataggatatattgcagctacttcagtaaaattataggaagcatatgctgcggcttgatttccgtccattgtttttgtgattttttgcattaggctaatcctcctcttctatttcgtatagaaaatcataatttatttatctcatttattatttgaaaactgaggaaaagtatacatatttctgataagctgtatattttatttaataatgagttttattaaaacatagcagagaaaattagttagaaatcaccatgaaatcaatacttgagaaagtggaggaaggtaattatgcaactaaaacaggaaaagtaagcctaggtaaagtaaataaaagttttgaagatataaatagattctttaatgaaatagatatacttatcaaaagtgaatttaataagactgagtttcttgctaaatcatttaccaatgctagccataaaacggaaagtataacattcatttctgaggagcatgtagttgcgtcagaagaagtgttagtaacattacatgaaaaaagattttacattcaaaagttgatgttggatacagactggtagataataagttatataggatagaagcttatcctaattcttttaaggagaagcttttgtttttttgtaatgtagtactaaaaattttaggaatataagaattttaaaattaagatgagattataagatattatattgggagataatatagaaaaaatttctaattatattagaagaaatgagtttgctatggtgaaaggataaaaaaggttaaatcatcattgaaatctattacttaatagtataagttaatcagaataaactttatgtggcaatagaaaataaattgttttaaacagctttaatttgtgaagatagttctgttataattaagaatatttcattccagttattaactctagttattttatcatttataggttttctgctataatttgtatccataagaagaacgttgaatcctgcctccgatagctgaattgcattactgtagttatcttcaataaaaacattacaatctaattcgtgtgctttgtcaaccttgtagtggctacctaaaacaaataagttatcataaggtatttcattgtttcttaaaaatagatgagtcagtgtttttagctctaaatctctagctgtcacaaaatatatattatgaaattgatgcaatgcagttataacaagtttagcaccatctcttagtttttgatctgagtggagtttgaacttatttttattatagaaatcgtcatattcctgcctttttatacccataacttcatgaatttcatattctgttacctgatcttcggttatattcttcttaaaatatttattcgccatatccagccagtcataagccttagttatcgttccgtcgatatcaatacagatatttaaagtattcattttatttacatctcctttattaaatatttatattagaaagcttccacagggttattcttaattgaggaagcaaagaatggttaaattctttatagatatagtatatttataaaaagctaagatagcattaaaggtatgttaatgttgtgttacttttatgaataataaaataatgttagtttatgatagttattaatatggaatttttaacattatcttaaaattttacgtgcagaaatttaacaattttgttgtatgatatgagcatatagatttagaaaggttgtatttaaaacaacttactaatttaatgcttatattaaatataatttatacggcattatggtgaagaattagaaatgtgatgtataattacagtaaaagataaataaattttaagtacagcgttttatagaataaatgatgtgattttaatactatacaaattaattaatgtgtacaaccttaatatatttaccattgactttatgtaatgatgaaatttaatttcaaaaataaaaaggatggtgggataatatgactccaaaagaactaactcaaaaaacagttaaggatataattaaaagaagaaagagagctgaaaatgagattaaagcttatcaaagtgaccaaactgcaaagaaaatgaggaactggagtgttagggttggaggaagtagatggtaatgatttaaatatagatcgagtatatggattatataataaatagagttaccaacaaaaggtgactctatttttcatttatatgttatttgaaataagtacattgatttgctatttatgtcatcgttactgataaaaaatgtggagggaaagttgaaaatagaaatattgtgatattgaagcatagaacgcagtaggttttgtatagcatcatgatttaaagtatataattttaataaagatatgtatttagagtagtaattttggatttaagttttaattaggaagttgtagatgtaaacaatcatataatttttagagggtagatttactaaagttacaactgtcaatttaaaattatcaatataagatttaaaggagagggaaagaatgtcagtaagggttaagtttataagtgaagtagaagttaaggatgagaaaaaggttttaaaagctgctaaaaatgctaaggtaaaaattaatgactcatgtgaaggaaaaggaaaatgtggaaagtgtgttattaaagttatagagtgaaaactttctgaaccaactaaagaagaattaaaagttttaggaaaagaaaaaattgatgatggatatagattggcatgccaaacccgtatacttgaggattcagtgatagaaataatagatagcgaagatataaaagctaaaaaggatactaagtgtggtactttaaaagttaaggatagtgataaaataaaattacgcaaagaagatatagatgctaatgataaagtagaagcttctgaaaccaaagaggcgaaaattaagatagatagtgatgataataagttgaaccataaggtgcacaacaaagatacggcaaaaaagaataaaaaattagataaatagaatatatagaatataaagtacataaacaaaaaaaagttaaattaataagaatagatcagtgaataatatttatttcaaaataaggcttagaaatgttattgaattacatttctaagccttattattcatttcggcgagttatatgcataggttaaggtcttagttgaattatctatataaaatcagtaaaaacaggaggatttttaacatgctttttacaaggaaacaagtgttaattaataatcgggtattacacttaataatgtaaataaatagattttaaaggataggtgaaagaatgtatactagaaatttactgtcttataattataagtctaatatagatagcatgattataagaaaaattaatctaataaaaatgctttttctcctgttattgttaattatttttttgacaagtatagtaaggttctataattctattgaatgtacaaatagtagtagcctcgcagttgatgactttaaaagtgatatcagtatgctgagtgaaacggtgaatattattaaagaacttagggaatttcaatttaatttacgatcatcagaccataatttgaataattttattgttataacgaaggggaaatatgcaggaacaatactttataatggacctttaaaatttattgatgatgaacataagcgttactttggattagaattatgtatggatagtaaatgattttcaaattttagagtgatgtatttatattattcaaaaactaacatcaaatttaaatattattaaattcgacatatatatttaataagtttatcatataagatataataaatgataaatttatctttgtgtaggcataggagaaatatatggagaattatgtggattttattaataaggcttggaaagactttatttctacaggaaatgtcaatcctaaggtgagaagtgaaattggtgattcatggataagatgcatgaactatggtgttaatccttatgatggtaagggtcatgttagacattctaatataaaagaattaattgataaaaataatgaacttatatctgtggctagacccattatggaaagtatttatagtatggttcgaggatcaggatttgcattatttttaacagataaagatggatatatagtagacgtaataggcgataacgatataatgaagagaattgaggaattaaacttccttaagggtgaattatggtcggaaaatgtagttggaactaatgctatagggacggcattatatcttggaaaaccagtgcagactataggagcagaacattatggggtaaatcaacactcttggacttgttctgcatctcctatttatgatgaagatgataatttaattggatgtataaatatgtctggaaattattataatgcacattctcatacgttaggaattgtaactgctgcggcacaatcaatacagaagcaaatggcactcgctatttcgtataagttacttaatgtgacatttgattccatatcagaaggtatgatagttattaatgagtatatgaaagttaaaagaataaatggacgagctttaaaaattttaaacatatcattggaagaagcaatgaatatgaatattaatgaagtgttaaatggcgtcgactttcacaaattattgcaagaaaaaaataaatctttaaataatatagaatgggatttttccataaataatgacataataaaatgtgttataaatgtcttaccattaaataaaaatggtaagagcagtggtatggtaataacttttacagaagttaaaattgtgcataagctagtaaataagtttgtgggatataaagcacaatatgaatttaaagacattatgacaacaagcaaagagatggcaaatatgatagccttcgctaaaaaggcttcaaaaagtgactgcaatatactaatacaaggagaaagcggtactggtaaagagttgatttctcagtcaatacacaattatagtgatagggctagaggtccgtttgtcgctgtaaattgtgcatcaatacctagcgaattagttgaaagtgaattatttggatacgaaaagggtgcttttactggagcatcaaaagaagggcatccaggtaagtttgaattagcagacggagggacaattttcctcgatgaaattggtgagctaccattagatattcaaagtaagcttcttagggttttagataatggaaagatcgttagagtcggtgggacttatgagaagcagctaaatgttagagttattggggctactaatagaatattgaaaaatgaaataagaaggaaaaattttagggaggatttatattataggttaagtgtaatggaaataaagactattccattacgagaaagaaaagatgatatagatgtacttgtaaatgattttgttcaaaggctaaacataaaaaacaaaaataagattataactgtaagtaaggaatatattgataagttaaagaaatacgattgggacggaaatataagagaacttaagaatgttgttgagcgagattattacttgagtgaagatgaaatgatgaatatagatataaacaatttagattacaataatatgacacaaactttgcatcaagagcctataaatcaagaggagattaaaataattcctcttgatttattagaagagaatgctataagggatgctataaaaaaatgtgatggaaatcttcaactaacatctaaattattaagtataggtagagcaactttatatagaaagataaaaaaatatcatatagatgtatcaaaatgagaaaagaaaaatctgtgtatcaaaatgagaaaataaaatgtatcgttttgatacatttttcttttgtagttcaatagtttatatataaaatcatatataaataataggtaaaataaaattatatcaagcaaacaacctaaataacgcaaaaaaatataattctagtcataacttggcacgaaaattgcttaataaatatatgtgaattaattaacaatttatccaaggaggagttttaagatgaaagcagcattatggtatgcaaagaaagatgttagagtagaggaaattgaagaacctaaagttacagttaatggtgtaaagattaaagtaaaatggtgtggaatatgtggatcagatttacatgaatatttaggaggacctatatttataccagtaggacaacctcacccattaagtggtacaactgctccagtagttctaggacatgaattttcaggagatgtcgttgaagttggtcctaatgtaaagaattttaaaccaggagatagagtaatagttgaacctatagttgcatgtggaaaatgtccagcgtgcttagaaggaaaatataatttatgttcatcattaggtttccatggactttgcggaagtggtggaggacttgctgaatatacagttttcccagaagaattcgtacataagattccagatgaaatgtcttacgaacaagctgctttagttgagccaatggcagtagcattacattcaattagaattggtaattttagaacaggggatactgcgttagtactaggatctggtccaataggactagcaactattgagtgcttaaaagcagccggtgcaaaattaataatagtattacaaagaaaatctataagacaagagtatgctaaaagagcaggggcagatgtagtattagatcctaatgaagtaaatatagcagaggaagttaagaagcttactaacggattaggagttgacgtggcgtttgaaactacaggagctcaaataggttttgatacaggtatagatagcttaaagtttgaaggaactttagttgtaactagcatatgggaaaatgatgttaaatttaatcctaatgtattagtattcactgagaagaaaatcattggaacattagcatacagacatgaattcccagcaactatggctcaaatgaaagatggaagaataaaagcagaaggatatgtaacaaagaaaatacatttagatgatatagttgaagaagggtttggagcattaacaggtccagaaaagaagaaacatgttaagatattagtatctccagacaaagaacttgtatctaaatcttaatctatatagaatttgcaattagcaataaagatattaaatagtacttatagataaagtatattctcgcaagaacaaaaattatactaagattcagatgaatagaaaaaatcatctgaatcaagtttacttggttaaattaggaggaacgtaaatgtataaaatagtgaataaaaaggagctaacaaataatatattttcaatggatatagaagctccaagagtagcaaaatctgcaaagcctggacaatttattatcataaaaaatgatgaaaaaggtgaaagaattcctttaactatagcagattatgatcaggaaaaaggaacagtaactatagtttttcaaactgtaggaaaaggaacaaaacagttagctgcttttaatgaaggggatcatgtagctgactttgttggaccattaggtgtaccaagtgaatttatacatgaggatatagaagaattaaagaaaaagaatttcatctttgtggcaggtggagttggtgcagcaccagtttacccacaagtaaaatggatgcatgaacatggaatagctgtagatgttattttaggaagcagaaacaaagatttattaatatatgaagataaattaaagaatgctgctggaaatctttatgtaacaactgatgatggttcatatgaatttaagggaactggatcagatatgcttaaagaattagttaataatcaaggtaaaagttacgatcatgcaattattattggaccaatgataatgatgaaatttacttctatgctaactaaggaattaggaatacaaacaacagtaagcttaaatccaataatggttgatggtacaggtatgtgtggtgcttgtagagttaccgttggaggagaagttaagtttgcttgtgttgacggaccagaatttgatggacatttagtaaattacgatgaatcaatgagaagacaagctatgtataaaacagaagaaggaaaagcacagttagaagttgaagaaggaaatactcatagtcacggtggctgtggttgcagaggtgataaataatggacatgaatgagagattagttagaataccagtaagagagcaagatccaaaggttagagcagcgaactttgaagaagtttgtcttggatataacgaagaagaagcaactaaagaagcttctagatgtttaaactgtaagaatcctaagtgtgtagaaggatgtccagtatcaatcaatataccaggattcatttcttatgttaaagatgaaaaatttgaagaagcagcaaaagaaatttcaaaatacagctcacttccagcagtttgtggaagagtatgtccacaagaaaggcaatgtgaaggaagatgtgttttaggaataaagggtgactcagtatctattggtaaacttgaaagatttacagcagactgggcagcatcacataatgttgatttaagtgcaacagaacctaaaaatggaattaaagttgcagttataggaagtggtcctgcaggacttacttgtgctggagatttagctaaaaaaggatatgaagtaactatatttgaggcacttcataaagcaggcggagttttggaatatggaattccagaattcagacttccaaaagaaaaagtagttaaaaatgaagttgaaaacattaagaagcttggtgttaaaatagaaactaatgttatagttggcagaactataactatagatcaattgtttgaagatgaaggattcaaagctgtatttataggttcaggtgcaggacttccaagattcatgggaataccaggggaaaatgcaaatggagtatgctcagcgaatgaatttttaacaagagtaaacttaatgaaagcagcagtagaaggatatgacactccagttagatctggtaaaaaagttgcagtagtaggtggaggaaatgttgctatggacgcagcaagaactgccttaagacttggatctgaaagccatatcgtttatagaagaggcgaatcagaacttccagcaagagtagaagaagtacatcatgctaaggaagagggagtaatctttgacgtattaactaacccaacagaaatcttagtagatgaaaatggatgggttaaaggaatgaaatgtgtaagaatggaacttggagaaccagatgcatcaggaagaagaagtccagttgaagttccaggctcagaatttgttatggatgtagatactgtaataatgtcacttggtacatcaccaaatccattaatttcatcaacaactcaaggattagaaattaataagagaagatgtattgtagctgaagaagaaacaggtcttactactaaagaagcagtttatgctggtggagatgcagttacaggagcagcaacagtaatacttgctatgggtgctggtaaaaaagcagcaaaagctatagatgagtatttacaagaaaaataaaatataaacataaaataaatataatttttatgatcaaatcctaaattataaagccttggcaatattaaatgagtattgtcaaggtatttttattctttaaggattcgtaataaatgtgaattaaaacctatgctcgtatagaaggaagttttatagttaagtaatttatgctaaaggagtataatggatatatatttagatatagtaaggagataaaaatggaaaatatattagttaaagaatattatgattggtttagctcttatgtaaagaaattttatggggaagatagcttaataaatcagaatattgaacttaaggaaatacatacgctaaaagtcgcagagcatgctgtaaatattgcaaaatctttaaatttcacccaagaagaagttgatacagcggagataataggattattccatgatataggaaggtttgaacaatttaaaaagtataagacatttagggatgctttttcagaaaatcatgctgctttaggcgttaaaatattagaagagaatggaacattaaaaaacttagatgacagtagaagaaagattattattaaagctgtaaatcttcataatacaaaagatcttccgatggatttgaataaggaagaatcattgttttgcaaattgattagagatgccgataaacttgatattttcagaatcattatgggatatgagagagaaagaaaaaatcatcctaatcaggcgcttgataatttaccttttacatcaggctataattcagagcttattaaggacattcgttcaaacaaaaaaattagtaataattcactggaaaattataatgatagaaaaatatatgaattaagttggataattgatttaaatttttcattttctcttaactatataaaggagagagaagttttaaaaacattaattagctgtttgcctaaaaatgaagagattgatgacttagaaaggtaccttgataaatatatagaaaattccatagtaaaataatttatctgtaaatgaacgctttaattactttctgtttgataataatatttaatttatggctatactagctaacctgagactactacccaaatgctaaatgctgttaagtttaatctatatatctataagcattataatgtctataaaatttagtggcatataatatgtagacataataacgaataatacttatgttatttggaaaattaactttatgtaatctttaattgaaaaatacatttttatagcaaaccatatgctgtaattgccttatagtaaagtacttgtaagttaattacttcaatgaagagtatgttttgcataaatatatttaagaatgataattattaagatagcattgaaaaatagtatagtcaggggtggaaagtatggaaaacagttataataatttaaaaatagcagaacgtggagctagagtgagtattatagcgtatataacattatcattattaaaactcggagttggcttttttgctcaatctaaggcattattagctgacggaatcaataatactaccgatataatagcttcagtggcagttttaattgggctaaaaatatcgggaaagccagctgatgatgatcatccttatggtcatcttagagcagaaacaatagcatcactaatagcatctttaattatgctggctgttggtcttgatgtgctctataatgcgattaaatcagttatcttttttaaccctaaggctcctgatttagtatctgctgtagttgcaattttttgtgctgcggctatttacatggtatatcgttataatatgaggattgctgttaagataaaaagctctgggctaatggctgctgcaaaagataatctttctgatgcatgggtaagtattggtacgaccataggtattgttgcttctcagtttggttttccttggatagatcctcttgcagctgtagttgtaagtgctttaatattaaagacaggatgggatatatttagggaggcaactcataatctatcagatggttttagtagagagaagcttgatggtataactaaatctattaaccaagttcctggtgttaaacaaattaagaatataagagcgcgcgttcatggaaataatattttacttgatttggtagttagtgttagttctgaattgtctttagttgaagggcattccattaccgaaaaaatagaagataaattgaaagaagatctagatataacgcaggtaatggttcatgttgagccggataagtagaaagtataaatgtagctgaggaaaaaataaaattcctcagctacattttttatttggaattaattaagttgtaaaagcatagcgaaccaatttcatatcgagcgaataatataatatgtagaattttaccaatgaatataaagagatgagcataaagcaggtgtttaaatggatattaatcgaattatatttagtataacacgaggatattgcagatatattggttccggttcttgtagagaagtatttgatcttgggaatggatatgtagtaaaaatagcaaagaatgcagctggaattgcacaaaataaaacagagtattatatttctcgttatgacaattctaacatgtttgcgaaggttatagatgtttcaaaaaactttgagttcttaattatggagagagcggataaggtatataatattacggaaatatggagatattttgatgttaaaagtaaaaaagaaatgtttgctttaaaacagataaaaagtatttctcaaaattataatttactattaagtgatttgaatagacaaagtagttggggagtaattaatggcaggccagtaattattgattatggattcacaagagaagtaaaggaaaaatactattaagttttttactaaagcaggattgagtatatcatatcctgctaaaatattagattactaaaattcaaggcaaagacggcttaaatttcctaattcatactctcgaaaaataactctaggaattagtagcgaactgctgcctaatgctataaatagcggaacaaaatgctcagggcttggaacagccaaatcggcatttggagcttgatctctataattgtaaagtgaattaaaatcattttcttttaacctgttaattaaccattcatcaaactcttcagcccaagaatcattgcttacagcttcaaaatcaactaaatttagattatgaactgtatttccgcttccgataattaagatatcttcatcacctaaagtttttagagcgctacctatttttatttgttcttcaatggataatttcgagtctattgaaacttgaacaacggggatgttggcttctggataaaggtgttttaaaagagtccaagctccgtgatctagacccatatttaagtcttttttaacttttatgccttcgtgtgaaagtttttcttcgacttttgctgcaactgtactagaaccttgcgcctcatattttacattgtaaagttcttctggaaatccataaaaatcatatactgtttcgtatgtggaatcagaagatgatatagttagtgtttcactatcccagtgtgctgtaaagataacaatagctttagggtttaatttctttccaagattatttagaaattcagtataattatcttcttcaatggccatcattggagagccgtgtgctaaaaataaaggtttaaccatataataaaatcctcctttagattcaataattaattaatattagatattaccataaagatcaaagttaatacataagttttacggaatattgacttatttaatgaatattattatatttagtataatatcataagttgcttatcttaattaagtgattatgatagaatagtaacaggtggtgattaaatatggaaaaatttcatatgtgcccaaggtttgaaaatgcttttgaattactaggaaaaagatggaccggattgattataagaacattattgaatggacaaaatcgattttcagatatagaagaagctattcctaatatgagtgctcgtatgcttacagaacgatttaaggagctggaaaaggaaggaataattattagaaaagtttatccggaaactccagtgcgcatagaatatgaattgacagaaaaaggccgtgatcttcaaagtgccatggatgagattcaaaaatgggcagaaaaatggaattaactaagacaattcaaaaaatataaagaattttcttaattacaatagagattctttatatttttttattgtttgaaaattaaaaaaattatgaatttatatttaaaatactattgactaagtgttataagtatgtaataattaatctaaagttacttactaaatgtaagtaactaattaaaaatattgaagtggatttattaggcttcactgtttttatataaaagatgtactagttatagttagatataattttaaattactataagtaattatttggaaagaaaaaaatataaatacttaaataaatttagatatgataggaggaatgattatatgtcaaaagatttttttactgctgtagcagatagacgttcattttatggaattagtaaagaaaaggtggtttctgatgatagaatcaaggaaattatagaacatgctgtaaagcatacaccatcatcattcaattcacaaagtgcaagagtagtgctattgttaggagatcatcatgatagattatgggatatcacagagaatgctttaagaaagattgttcctgaagataaatttgagccaactcaagaaaaaataaattcatttagaagtggttacggtacagttttattttttgaagataatagcgtgatagaatctcttcaacaacaattttcactttataaagacaatttcccaatttggtctcaacaagcaagtggaatgcaccagtttgttatttggactgcattagaaattgaaggatttggagcatcgcttcaacattataatgagcttattgaaaatgacataaagaaagaatggggaatatctgatgattggaaacttattgggcaaatgccttttggaaagccaacagcggacccaggcccaaaagaatttaaaccattagaagaacgtgtaaagatatttaaataaagaaatatttcaatgattattttcatataataggggtgattttgtcacccctaaaaattatttaactgattctaaacttatttaaaatcagaaaataatgagattatgatttaaatgaataattctatttattttaaataagagtatttttagctggaaatgctgagatatcaatagaataaagaggctttaggctttggttatgatggttttgaatatataattgggactatacttagcattaattatatttatatagttgacaattaacaatatgtaacttataataaacaagcaaataaaaattttttacctatattggtaatactttaatttttaaaaattagaagtaaaaatttgatttttatagtcaaatatggtgaacgtagttcagttggtagagcgccagtttgtggcactggttgtcgtgggttcgagtcccatcgttcaccccatactgggatgtcgccaagtggtaaggcaatggattctgactccattattcgcaggttcgaatcctgtcatcctagccaatttttggttcactagctcagtcggtagagcacatgacttttaatcatggtgtcccgggttcgattcccgggtgagccaccaattatttaacaaaattgaagattttgaattaagcttagcattagtatgctaggttatttttttattctataaaaattcatatttaaattaaatctgtaaatactatgttccttgtagtataaattatgaaaaagactggttttgaagattgccttttaaaagataatatattcacctaccagatttcgatcacatgcatttgaaaagacagatgcgtaaaagtctccggttgatttataatttataaatcaaccggagacttgtggaaagtgaaaatagataagtgatataaacaataaactacatattataaataccattagataattgcgaaactcattgataaaaatgaataatgattgatttgaagttgcaaaaacattattaatggatttaatggttcctgctatacaaatataatagttgacttcttaaaaaagggcgcacgaaataaagcgaaggtgaattccaatttttataaataaattttatgcaattaatggctttaagcttcggatatatttatgtttatgaattttatctgccacgataactgttattagttgagttattccggctagaagtaaatcagcatgaagtgtttgctcattttgagtcttacgctccgcgacgcagtaactatatttgaagtgatttatatttttttcaacagctactctgattttataagtattactccattcttgggttcctcgtgttattccaggatatgcgcgcagattcttttcaggataaatataaaacattcgtccacataaggaatttgtacatggattttcacattgagttacacgtttgctctttttggtttctttgttatataaccatttcattttagggcatacaaacttcattgttggaattctagaacgaagatgacttttactaccttcacgtttcattggaatagaaggatcattcggacagcatggaatgccgtcttcgtttaaagggcaatcagcattttctagtgtaagcctagtttttaaaggaatatatgctttatcaaattttaattcgagaagaagatcacgataaatttgaatactgtcaaaagcagcatctcctaaaaaggtttttggacttattaatggatgcttgttaaaaaaatctttgagaacagggataagagccttagaatctgcaagagatttatcttcatcaggtgaatcagattttttctcaacaataatatcaggatgagcattgagaaaatctttattatagaacgaaatatctcttacgataccgaggccattagtaatgattccgaatttaaaagcatagcaaaaatgcccattaatatacatttgttggatggcagggttggctgaagcgtgtgatggcatagagccataggcagctttataaggatcataagagtcatctaaattgcatgctttcttaaaatttttaagctgttttataatgcgattagcatatttaggattattttcagtgacaaatgcttcaaggcctgaagtatcaaaaatagtcatggaagcaagagccgtatcaatctgttggcatatcggttcagtaatatcaacaagattatcgaacatggattgtaagtccaaaagaaagtcctgcttgaaacgagtaaacttagatgaatcaggaactcttaaaaagccgcagaagtctcttagttcttgagaatatttaaggaaaataattaaaagagaatctgtaggaatagaaaaaatgcgttgtaaaattaaagcactgatcatagcataaagctgatattttcgcggccttcctgtggaagcgtaaaaatggttaatgaaagatgcaggaactaactcatcaaggtcgatagtgttttcgagtaaagaaagaaattggaatttatcattttcaaatttttctttgcaatcagaataaacatctgccaaagaaagctgtttatatgttatcatatatatgactcctttctgaggtatatggtagttttgtttttaggcaattcaattttaccataaatcagtgaggagttattttattttgctaaaaaaatatcccgcatttctgcgggttgcggcgtttcgcaaacgcctatataaataccatactagaaaggagaaacaattttatgcagcaggcattgaaaataagctgttaaaagctcttaattgtaggttgtttcattaatgcttgtcacaatgaaattgggagcaagcattaatggtgcaacctgcaatttagcactttcagcgaaattttcatagtcctgtgaaataacaatgtttctcctttcgaatgcttattgcataagtctaagttatctttgaaatattatgtttaagcacttttgcgtttctttgaacgaatagtccagatgattagtcctatgaagaacccgtaaagtgctggtattatccatccaaatccataatcaaagccaggtaaatatgagtgagcaaaattcacaagttgcttgacgattaaattctcttgtagaggctgaggcaatgatttacataaatcaaaaaatgccgcaataactgtgaatcctgttgtccatctataaacatcactttgtttattaatgaaaggcgctaatagagatagtaggattaaagtaattactaaaggatataaaaacataagtactggtatagatagttgaatgatattacttaatccaaagttagcgattatgaaagagaaaactgtgaataaaacagcatattttttgtaagaaatagagtttggaaacatttcgctaaacatttcagaacaagaagttatcaaaccaatagctgtttttatacatgcgattccaacaataaaagctaataatatttgtccagtaaaaccaaaataatgattgcttaccatagataatatacttccgccgttatctgctcggttaacgctgcctaagcttgtagcacccatataagctagcgatccatagataatagtcattcctataacgctaacaaggcctgatttacatgtctctatagcaattgattgagggtttttaactcctagtttttgtatgttagaaataataataatagcaaaggctacagaagcaagtgcatccatggtattatatccatctaataaaccagtgaataatggctgagttgcataatttccttgagcaggaaattgacttgcttgtcccattggatttacaaatgtagcgattaataaaattgataataataccaagaaaataggggtaagatacttaccaacccaatctaaaatttgtcctggttttaatgaaaaataaatagtaaaagcaaaaaatattaatgaaaaaataattagtcctaatttcaaatatccatcagaaataaaaggatgaattccaacttcaaatgcaactgtagcagtacgtggaattgcaaataaagggccaattgttaagtacaataagcatgtgaatatacttgcataacgagagctaataggcctcgccatatcaaataaactttcacttcttgaaagagcagatgcgataatccctaatataggtaatcctactccagtaattaaaaatccaatagtagctgtaaaagcgtgatctccagcctgttgtcccatttgaactgggaaaattagattaccagcaccaaaaaatagtccaaataataatgaacctattaataagttttgctgaaagcttagcttttgtttcataaataatcctccttaaatattttcgtattatcaaaataattatacttcttttattaaagtgtttatttttttgcattttgataatacattgtcaatttttaattataatatatttatttatattagtaaaactcatttttaatatattagttaaattattctacttaaaaattaaaatgaaagggatatttacatatattgaagtgaaatcactttgtcgaataaatatgtatgtaaacataatttttttataagatgatttttaataaaatattataaatttaattgttgtgtttaaaaaaagatagtgtataacacttaattaataaaaaaaccaaacgctgtgctattttattcaaacactgtgtaaagaatatatatttttcttaaacactacgagtaaaaaaataaacagttaaaaaagcaatcaaacaatgttggatttttactgaaaatatttttaaaaatgaaatcataaaataaaaatatttccaaaagagcgggaaatggtaaaagctttatatagtaaggtcttacactgtttaaatgaaataaaaggagcttttaaatactaacttttgaaaaagtttttatagagtttggcatccgtattgcttttgtgtaatggcatggaatgaagatgatttaaattatatagagcggaggagattagttatggaagaattagaaatagcaattatgaatattataatcaatgctggagattgtaaaaatcacgcttatatggctctcaacaatgtgaaagaagaaaattatgaagaagctgaaaaagaaatggaattagcaaatgatgctattgcaaaggcacatgatggacaaacagtgtttctacaaaaagaggctaatggcgaaagaataaatatgtcagtcttgtttgtacatgcacaagatcatttgatgactgcaataacagagaaaaatttaattgagcaaataattgaactaagaaaagttataaatggattagtgaaagtgtaattaaaaaacagattaaatttaaaataaattctatacaaagatatacttttttaaaggagaggatagtaaatgataaaaattagattattttgtgcagcaggaatgtcaacaagtcttttggtaaataaaatgaaggatgcagctaaaatcagggaaatagaggtagatattgaagcttttccagaaggtcaaatggataaacatctagatggtgtaagtgttgcgttattaggaccacaagttggatacacattaggaaaagcgaaaaaaatatgcgaaccattgggaatccctgtagatgtaatacctatggttgattacggaatgatgaatggggagaaagtattagattttgcgctaagattagctaactagtgaatggacaaatatgtagaaatagaaggagtaattaaattatgaaattttctaaggattttctatttggagcagcttctgctgcatatcaggtagaaggagcatataacgaagatggcaagggaatatcaaattgggatgtattttccaagattccaggaaaaacttttgagggaactaatggagatatagcggtagatcattaccatagatataaagaggatataaaattaatggcggaaattggaatagaatcgtatagattttctgtttcttggccaagaataattccagatggtgacggagaagttaatcaaaaagggatagatttttataataatttaatagatgaatgcttagaatatggaatagttccatttataacattatatcattgggacatgcctcaaaatttagaggaagatgggggatggacaaataaaagaactgttaatgcttttgtaaaatatgcggaggtatgttttaaagcatttggtgacagggtgaagcattggattacttttaatgaaactgttgtatttgcatcgctagggtatctagcaggagcacatccaccaggtattaggaacaatcctaaaaagtattttcaagtaacacataatgtttttacagcacatgccaaagcggtaaagtcctataaggaaatgaagcagtttggtgaaataggaataactcacgttttttctccagcatttagtatagatagcaatgaggaaaatattaaagcagcataccatgcaaatcagtatgaaattaattggtattatgatccgatattaaaaggaagttatccagaatatgtagttaaacagttagaacagaaaggatggcttccagaatggactcaagatgaattagatgtaataaaagaaatggcgccaaagaatgatttcataggtcttaattattatcaaccgaaaagggttgcaaagaatgatattcaaaatgaaagtcaagaaagaactagagagaattctacaggagcaccaggaaatgcatcatttgatggagtttttagaaccgttatgttaaaagataaagtttatacaaaatggggatgggagattgctccagatgcattcttagatggattaaggatgttaaaagatagctatggtgatataaaaatgtatattactgaaaatggtttgggagatgaagatccgataattgaggatgaaatagtagatgttccaaggataaaatatatcgaggcacatttaaaagcggtgaagagagcaattgaagaaaatataaatttaaaaggatattacgcttggtctgcaattgatttattgagctggctaaatggatataaaaagcaatatggctttatatatgttgatcataagaataatttagatagaaaaataaaattatcaggatattggtacaagaagataatagaagaaagaggagaaaaactttagtaaagacttagtagttaaaagatcctaatatgtattcattaagcgcgcaatgtttacttatattaagatttgaaactttaggtaatataaaatttgttatttagttgagtatttaaggaggaattattatgtcatcgtttcaaaataatttaaatgagaaagtaataccgatagttatgaaatttgtcaacttaaaaggtgttcttgccttaaaagatggtatcttatatacattacctctaacgttagtgggttcaatatttctgttattagcgcaattgccgtatcaaccattaaatgactggttagctgttacattaggtgcagggtggacagatcctttatggaaagcatatggagctacatttaatataatagcgcttatggggacaataggaatagcatatacttatgctaaaaatgaaggttatgagcctttatcagcaggagtaatatcatttgtagtatttgtattaacaactagctcttctgtagtaactaaaagtggagaaacagtaggagatgtaatcccaacagcatggtgtgggggaaaaggtatggtcactgcaattattataggattaatagttggcgcagtttactcatggtttatgaagagaaatattacaataaaaatgccagcaggtgtaccacaaggtgttgcaaactcttttgcagcgttaataccaggagcggtaataatagttggtgcaacagtactttattcagtatttaactggggattacacacaactcttatcgaatggatatataaagtaattcaaacacctttacaaggtatgacagattcaataggtggagtattatttatgggatttgcaattcctttcttatggtggtttggggttcatggttcaacaatagtaagtggtgtaatgtcaagtgtattgacatcgaatacattagataacgcagctatagttacaagtggaaaggaattaacaatagcaaatggagctcatatagtaacacaacaatttttggatcaatttatgacagtaacaggggctggtatgacaataggtttagttgcggcaatgttggcattttcaaagtcagctcaatgcaaacaattaggaaaactcgcaatagtacctgcgatatttaacataaatgaaccagtcacattcggaacaccaatagtaatgaatccttttatggctcttccgtttataattactcctatgttatcaggaataatactttattttgcaatagcaacaggaatagttccaccatttggtggggtaatggttccgtggacaactcctccagtaatttcaggtcttttagttggtggtgttagaacagcaatattgcaattcttagtattagtaatgtcattctttatatatcttccattctttaagaagttagataatataaactataagaatgagcaagctgcacaaagaggaaatggcgtgtcagcataaataaaatatttaagcaaaatgttacacaactaattttaagttgtgtaacatttttattttagctaataaacctgctttctaagtgaaacatgtaagatatcatatagtttttttgatataatattggtataatgtaataaataaggaatatgaggtggggaatttggatccaattagtttgatgaaatctatggcttcaacatttacgaaagttgaacttgaaatttataatagattgatgtctgatccgacattgattatgaatagcacgatagtagtacttgcagaagatcttaatgtatctaattctgctataacaagattttgcaaaaagttaggatataaagggtatgttgaatttaggtatgatttttcttgttattttaataaagaagaggaagataatgaagaccatattgttaatagaacagtcaccacatatctatctgtcttgaatatattagaaaaaatgataagtgaagatgagattagaaaattagtatcaaagatgaaaaaaagtaataatattcgagtaataggtataggagagtcaggattaattgctaagtatttaagatatcgtatattcaaatataaaagaaatattgaggcattggataataagttcgaaatagatgaaagttgtagtttagcagaagaaggagatatgctgattgctattaccaatagtgggaaaagtaaggaaattaatagacagatagtagaagcatataataatggtataacaactgtagtgataacaactaatgatattgcggttttaagaagcaagtcccatttttacttccagatgccttcggctggacaattttataaaccaggtgcatatgacaatcagccaattattataatttttttagagatgatagttaacttatttgcgttttttaacgaagagtagtaaaaaaataagaaagatccaaattcaattatagaacttaccgtatatttcatttataaaaatatatagaattaatttttttataataaaaacctcctagaagtaatgttatgttgctatttctagaaggtttaatttattataaactaaaaagcttttttatttcctcatatttttcgtgagtaagtagagcatctttttctgtatttttaagtttgataatatacgtccatcttccgtatggatagatttttgtaatcaatgataaattgataatataggatttgtgacttctaaagaattgagtatggtctagtttttcttctatatctgataaagaaatggaagttgtgaagctatctgtttttgtatatataacagtagaactttcttctctttgaactaaaacaatctcctttgtatctacaaaacttataccttccttattttttatcataagcttatccaatcccttttcgtgctttattattttatctataccatctccatagctgggtttatttaaatttttaattctgtctaaggtctgcattactctttctattttgaatggttttattaaataatcaaaagcgtacaactggaaggcttcggacatatactctgcatgggctgttgcaaagataattatagttttagggtctatatctgttaatattctagcacaatctataccgttgcacttaggcatttcaatatcaaagaacaccacattagggcggtgctctttaaatatgtctatagcttcttcaccattatctgtttctccgacaacttcaaatccaccagatttatctagtattttttttattatggtccttattcctatttcatcgtcaactataagcacttttatattcatagaataattctcctaatttaaaatcttctttttctagttttactttttggctttccaactatctctgaaagtataatagcttgttgaagtctaactggtgttatttcctgggtaatagaatctataattccttgtggatttgaagaagctgcttcttttttatcatagtagctattttttgtattattataagaattcgtgttttcactagctatatcgtcaatggaatcaccttcgtcatattcttcatcatgattctctaactccgtatcgggagtgtcgtttatactatcattcaattcggctgcatttggatatttgaaaacaaaatttcttgaattattgtttgatatggacgtaggattgaatatagcatttgcaagaatttttaatacattaatggtatcatcatatttcatagttttcactctcccaggagtctattttttgtctctctgctctttgttatcactagaaagagattggcttttatttcctgcgctagaaatcgaacttctcatacttgtatctgcaataacattttgcatatcataataatccattattccaagttttccttctctaagtgcataagccatagcccttggtacttcggcttctgattctacaacagcggctctcatttcttgctctttggctacagccattgctcttctttcttcagctttagcttgagctatatttttgtcggcttcagcttgtaaagtttgaagttgagctcctatatttcttcctacatctacgtcagctatatcaatggatagaatctcaaaggcagtacctgcatctaagcccttatttaatactgtttttgaaatagcatcaggattttctaatactatcttatgactagtagaagaaccaactgtagtaactataccttcaccaactctggcgagtatagttgcttctccagcccctccgaccaacctttcgagattagctctaactgtaactctagccttaactaaaagttctataccatcttttgcaactgctgaaacatttggagtttcaataactctagggttaacactcatcttaactgcttctaagacgtctctaccagctaagtcaatagcagcagctttttcaaattgtaagtctatgtcagctctatgagctgcaattaatgcattaactacattatctacattaccaccagctaaataatgggcttctaattgattgacattaagtcccataccagcttttgttgatttaataagtggaattacaattttagaaggtacaactcttctaagtctcataccaatcaagttgaatatgcttacttgaacatttgctgctaaagatgatatccataatcctattggtataaatctaacaaacacagtaattaaaaatacaactgctattgctactataattaaattggtaatcattaataatctctcctttaaatataaatttatattttaactttttttactagtaatttaactccgctaactttaaatatttctacattagtccccttattaatgtattctccttcagaaattacatcaaatttaactccgtctatatctacagaaccagttggccttagatcagtaacagctactccagattttcctaacaaataatctaaatctgaagaactaatatacccatgttctttcttttgctcatcgggaagaattaatggtttaaagaactttcctttcgtgaaaaaagttagaacaacacctaacatgattccgaggattgctaaaattcctaatatcataactaaagcttgtgcaaaattctcagcagtcaataccactgcaagtattaaacatatagctccggcaattcctggcaccccaaaacctggaatatgcatttctaaaagcactaatccaaatcctactactagaagtaaaactgtaagaactgttacatcaggtaaaaatgcgctcatattttttgtacctccctccttggtatatagatataataagccacatcttgaagtttagtaacataaagcttctaagttatacattttttaagttcaaatgtcatttataagagtgctggcatctttgattataaatttatgagattttattgctctttttttggtagaataacttcaaaagatgttcgattatcatttgatgtaacttcaatcgtaccagaaaaactttcgacaatttctttaactatagcgaggcccatgccatcacctttttcatttttggttgagaatccttctttaaatatgttgcctataatttcaggaggtatgcaatctccattattggatatattgagttttatactcttcagatcttctgataattcaacaagtatatatctattatttggtttttgttttaaagcaaatatagcattatctataatattgccaataattctgcaaaaatcccatggttccatattaagattatttaagttgctttttatttcaagctccatatctatattattcttttcggccacttgcaatttcgcctgaaacaatgcgttaactgctggctttgaagtctttagagctttgctaattcttactatatctttatagacaggttctatatagtttcttgcttcctgaaattcttcaagttccattaatgagtaaatcacctgaatgtgattcaagtagtcgtgacgttgagatcttaatgttttattgaagtcctcaagataccttattgtatctattaaattattactgcctttcttaaataaaaaattataaaatattattcctgtaatgacactattaatacctatgcttatagctacgacataaatgataaaatttccttcaatcatatgtggattttgacttttgtagtaaataaatagagttataaagattatttgtattaagtttaaaaatatagatactagcacaatcttagagatgttgtaggcttgcttttttattatcatactttacctccttgcaaataaatgacaagtatattttaccatgtttctcttaatattaaccttgaatcatcttaatttattcttaatcagtgatagggaaaataaaatttgtttatatagtgttataaaagtttgtgaaaaattttaagatatcatatatgccacaattggatttttaaatttgagtcttaacttagctcacataacttaaatttaaaatgtgaatttattgttgcagcatacatgtataggatatataaattttatttaccaaatataatcaataagtatgtctgattttattgaatgtacaaggaaagagtaggttagtttttatgcaaatagtgaaaaaaggagtttgtatacttaaaataaagaggaataaattgtaaagtttagcatgtatagcacaaagatttatagtataatataagataataatgaaggataattaattatatggtcttgtaaaattatgctgataaatatttaggttattaacaataaacgtaaaatgaattatatttaatacgtttttgatgaatatggggaggatttatgaaagataaagaaatgtttattgaggaatatggcgattttaaaatgcgaaaattaactgaagatgatttagaacagtttaatgggcttttacgttatgcatttcagataacaatggaagatcttctgcatactggctggacagaagagcagattatgcatgctaaaatgccgattcttaaaaatgcttatgttcttggttggttttatcatgggaaattagcatcaatgattgtggtgtattccatgaaagtaaatatccatgatagtatttgcaaaatgggtggggttactggagtcgctacctatcctgaatacactggaaaagggttaattcattctttgattaagcgagctattattcatatgaatgaagaaggtcaagttatttcttgtttatatccatattcgatccctctttatagaaagcatggttgggaaatcatttctgataaaataacttttacaatcaaagattcacagcttcctaagaaaagatcagtagaaggaatgatggagcgtgtggatttagaatgtgaagatcttttaaatgtacatgattacttttcaatgcagcgacatggtgcaatgatcagagatgagcttgcttgggatgagtattggcgttgggatagtgatgatattattgcggccatttactacagtaagaatcataagcctcttggttatttaatctattatattagaaatgatatattttatattaaagaaatggtttatttaaatactgaagcacatcatgggatttggaattatataagtgcccattattctatggttaatgaagtaaagggaaataatttttcgggagaaccaatggcctttttatttgaagatagcgagatagttgaaactattaaaccatattttatggcaaggattataaatgtaaaagaatttataataaaatacccattcttagtaaaagcacagaaacttaagataagctttaaaataaatgatcctattgctcaatggaataatggtatttttaatatatattgggatgatgaagaaacagtatgcgagaagagtgatgatatgcatgctgctaatttagtggaaatggatattcagacattaacaactatgcttatgggatataagcgtcctacattcctatatgagtgtggaagaataaaaacagaatattatatgcttaaaattttagaacagttaataccagtagaaaagccttatttttcagattatttctaaatttaaagaatataaagatatagatgtttatatataatttccttacagtggaattctaaactgcgtaccaaaatctcaaactccaaagtcgtttgtgattttggtcctagttgatcaaggaaatataacttataagaataaataatagtcttgaaatatgatttgtttcaagactatttctgcatcaattttaaatgattataattgagaaaataatttaaccacataattgtattaataataatataaaattagtaaaaagattactatattcatgttgcattaaagtatattgaaatgacagagcataagtaggataagatttctctttgttaaatacttatatagcttttgaattacttgaactatcatcttttacttttaccgtttggccaattaaaaatatacatattccaattaaaataattagtgatccgataatttgattataagatatggattcccctagtattaagaatgctaatgtacacgttccaacaggctcgcctaatatactcatggaaatagttgaagcgcttaaccacttgattagccagtttaaaactgtttgaccaagtattgttgaaattaatgctaggcagaagaaccataaccaatcagagtttgcatagcctattagaggatattttaatatgacagaatatgctaataaaaatatactactacttaaataacaaataaaaacataagcaactagagataaattttttcttacactttgtccaataaggaaatatgctgtaataaccccagctgctagcaaagcaagtatatctcctattaaggctatcccaccaattctgaaatcgccaaatcctattatacagcttccgaatatagataaaaaaccaccgaatagtgatagtttctttaatctctcaccaaagaaaaaatagcttcctataaaagcaaatagtggctgcatagttacaagaactgttgaacttgcaactgaagtaaaacgcaaagattcaaaccaaagtatataatgtattgctagaaaaattcctgatgaaaaaactgccgctaattgtttgagtttcaatttttttatttctaatatgtattttttgttaaatagtattacaggtaatatcatcaaagttgaaaaaactaatctatacgtagctattattggagctggagctgtcgatagttttacaaatatagcagatgtagaaatagctaaaactccaaaaaataaaaaaaggtaatgtataattttatgtgaattcttcaaaaagattacgtcctttctaaataaaaataatttcataatatttctgcataaatataatcatatgatttaagacttttttaggatgtttaaagtcagtaactcgtttatcatgtatatccctcttttacttgatgcattgttctgtttcaaacttttgaatcgcttttgtagtagaagtcctatcgatgaaatagttaaacttgcaactatcatataatatgtttgttgaaagttcaactattattaagttagttatttatagtctaaaagtatttatagatatagatcattcataattaatgattaagtttctgattgttttaaattctaaagaataaatattcttcacaatatttattctttagaatattaccatattagaataaatattcttcagaatatgcttagaaaatgcggtctgaaaggattatagtataaaaatagcattgattttaatgttattgtagagaacaaatcatgtatctataatagaagtagatagggtttcgcttatgaagcagtatacagatgttactttatatttttctatttgaaaaagtgggagagttactggggaggtgtctgataaattcttagagtgattgtaaacattaaagatgattgggggattgtgagttgatagtcatgaaattgctagataaggagttggaattagagtattaaaaggtagatatggaattacagatggatctataaaaagaagatattatgagtaattagataatttgaaagagatatttgatatttgtgatgaaataaatatatataatacaaataaatttaagtatttacttgcatatatgatgaaataattaaatggaaaagagatataattcccgaatggaatagagggattttaaaataatgttagaggctattaaaatacaacagcctcttttgataaaacataaggggaatgtatctagttttgtgtaaaaaaaaatctagatacattctacaaggaaataaaaaagctgtactacaaggtatttaaaccaagtaatacagcaatccaccaaaacaaatggtgccgctggccggattcggaaaatagagagttggttaatactcgctaatagctgaaaggctcttactataaagctttgtgaccttatggatgaattttctattttattatttgttactatcgtagtaacaaaaattttaattgtaatttggcaagtaaatagaatatatcattatcaagaatttatatagtttgattattataataaaattagaagtgttagttttatatggatatattataatggagtatagatttaagaacattaaatattataagtgattaaacaagagaaaatataaagaaagaatttgaattgtattgtgatattataatagacataaaaaattgaagtgctaaatattcaaaaaataggaaaattataaatgtttatagtataatagggatgagcaattttatgaatttaatattctaccttattaaattttaagtagaatattaaacaaaaataaaatgcacaactttatctaaattatgaaagattagagatagaattttaaaaaatgtaaattttaggagaaaaaatgagtaatgatattacgaaagcaattgttaaaataacatataatgataaaaaaagaggtattacagagcaggggactggtattattgtatctttgtctgatacaaaaagggatgcaatattaactgtatatcatgtaattaacggatttaatggtaataatgaacttcttaagattgagagtgattatgaagaagaatttaagttacttgaagttttacataataaaagtgatgataaagatttagatattgctgttatttatatagaaaaattaaaatggttctctaaagaagataatatgattttgccaaaagacttttccttagaagtaaataattatgatgttagattggctgggtttccatcattaatagaacaagagggacttgatttagattatttgcctattcatgttatagttgaaaattttaaatgtccacgtgttatgctgtcattaaaacatccatttggaacaggaagagaatattttgaagatgaagtagcaggtatgtcaggtggtccattatattgtgaaattgataataaaatgtatcttcttggtgttacaaaaaaaattccagtaaataaagatagagaagcattttactatattttttatgtatggcatatagaatggtatctagataagattgaagaattatatggatgtgatatttcattttctaaagaaccaatgataaaaaaagttatttcaaataatgaggataaaattgaatttataaatatgtcagtaagtattaattcatatacaaatgttcaaaatgaggcagctgtagatgtctggaaaattattaaagatgaaagagttaatgatttgaaaaattcgataattagatattgcagacttcaacttgataaaatgtgtaaacaaaaaatgtatgatgagaatttttcggtttttgatttatatgtatatccaaatgcaatattaaaagataaagctattgataatattcaaataagttatgataatatggctgagttaagttctacatacttgaatcagaatatagagcacgatttctctagatttaatatgacatctaacaaagaaacatcagagccagttatgagagtgattaataggtgtttaaatggtcagaatataacactaatattagggtctcctggaatgggaaaaagcacatttattatggtattatataaagaattaatggatcatttaaatcaattaattattccaatatatgtagaacttaagagattaatatttagtaatggatttacaagcagtattactgaatatttgaagcgatttattaaaaattttgagactgctgatttttctgagtttaattttattttattattagatggttttgatgaattaaaactgttacttgtgggagaattacaagatttttttgattctgtcaggatttttcaggaagattatcctaatataaaaatagtaattactggcagatcatcggctcttattggattaaaagatatattgtctcctaaatataatatagtatttttggattattttcatgaagagcaagtaaataaatggttagaaaaatggtcgagtttaaatggtttatcaaaacaaatatttgattttaaggaattagaaacaagtagtattaatgaattaacacgaactcctttactgctttatttaatttgcaagatattgaaggaaaaatcagaagaacaattagctaaagatatgctaagttggaataagatttctatttttaaaactattattgattggacatgttctaatagtaagtttacaaagtttgaagaatctgaaattttaaaaggttttttgagcagcattgaaagaagtaaactaatcagggagattaataagaatattgctatctgcatgaataatttgaataaaaatacaattacaggatctgaaattcttgaaagggatattttaccagaagcccttaaagatacccaagaagaaaaaaagccacatatcataaaaacaatgttaacattaagttatatgaatcctgcaaaggcgaatgaagatgaacaagagtactatgcggtagaatttgttcataatagttttaaagagtatttaacttctgagttcctaattgataaaattaatgagattagcttactgtatgaaaaacgtaatgacttaggggcagtttacgtaagtaaagaaatcgcaaaaatattatataatttttttggtactgtagatctaagtaaagatataaatgattttttcgtaccaatgttacataaatttgaaaaaagtatagcaaaaaatgcttgtgatgcaataaaaagtttttattataataattatttggatcataatgtaattaatgaatataacaataatattttaatagatattataaatttatatcctaatttaaaatgtagtttattcaaaattgaatataacataggaaaaaatattttgattattataactgaattgtctgtgtacttaggtgaatattttaagataaatagagaaaaaactaatgacgatttctcgaggttaatttcatttttaagaagtgttgatgatactgagttatggaagttccaaaaaatgaactttaagtgtgctgatttttcatatgcaaagcttgacaatttagaaataggtaaattaaatgctgagaatgcaaattttggttacgcaaatcttaatgattcacatatttcagggacattatataattgtaattttaaggaggcagatttatcaagagcttcaatggattatactggattatcatattgcaattttgaaaaagctgacctatcatatgcaattttagttgagtctggagtgtctaaagctgatttttcagaagctagtttgtcagaagcacatatagagggaactttttttaataaatctaaatttgaaaaagcatctttaattatgactcaaatgtggagaagtgattttgaagattgtaatttcaatcatgctaatttatcgtctgctgttatgagggagtcaaactttaagaatgctacttttatcaatacttgtcttcgaaatgtagatttagaagaagcagatttaacaggtgctgatatgagtaatgccaatttatcaaatgcaaaaattaataaagctatatttgaaggtacaaaccttactaatgtagatttaacaaatgtagatatagaaaatatagatttttcaaaaacgataatagatggatgttactcaagaataataaaagaagatatagaataagtagttgataaatgtatattaaatattgaaataataaatattaattcaggttgaagcttgtgttgatagtgcaaataagttaagtaagatttgaactaatgtatagagaagagaaaattatatattctccaataatatcagtttcaacatctaaaaccaaatttggtttgtatattctaataatcaataagattgaaatataatcaaaatggaagtaaatatcaaatggaaattaaaattataactaattaggtaaaataatgaaaaatattgtataataaggatggattgttttatagataaatagtctatccttatcatatttttgaggggaaaagtagtatctatatttagagatttaatattgattaaaattacataatgagataagagggtgaaatatgaaaataacaatgatgaaggcaggatatggtgattgttttttgattgaaacaaaaaaaaatgatggattaccgtataatatattagtagatggtggaacaggtgatagttatgatggaagggaaaaaaatagggactattttttcccatatttaagagaaaataaaattgatttaatgattttaacacatatagatgatgatcatataaaaggaattcaaaggctatttaaagatttattaaaaaagaagcacgagcaattaagatcaaaaattatgaaagtcatatataattctccttacgctacagcattatatttagggaggccatatgcgaaaccgcaaaaagaagagcaaaaaatgaataatggtaatataagtgcttcatcagcacaaaatgtccaacaattgctttgtaatttagatcgattaggagatgaagtaattgtagtagatgataaaaaaataaaggaaaagagaaatataagtgagcaaggtattaaaataacatttctatcaccaactaaagaaacgctagaagattattataaaaaatacgagattgatattggaaaagcactaaaaaataaggtggataaagcaaaaggaaatattagcaagtgcaaaatagaggacgattataaagagacgattgaagaactgaaaagaaatacagattgtgaggagttaacagattataatcgggcaagtattgcttttttgttggaggaggaagtgactcaagaaatggtcttaatgcttggggattgtgattacgatatagtagaaaaaaaattaagagatttaggttacgcaaaaaataataaattgaaacttaagtatgtgaaattgtctcatcatggaagtattggtacattaaaaaatagctttcttgaattggttgagtgtaataattatcttatatcaacagatgggaaaagttacaatcaccctaataaaaagacattagctagaatatggagtactaatgaacaagcaagattttattttaattatgaaaaacttataaataagatttttataaaggatatggaagattcatatcgtttgaaatgcgaaaaatatcaatttacaggagaaaaaaatgagtaacagtatttcgaaagtaattgtaaaaataacttatgataataaaaaagatcgcaaaaagatacaaggtactggtattattgtatctttgcctgatgttgaaagagatgcaatcttaactgcgtatcacgtaattgaaggctttgatggtaaaaatgaaaacattaaaattgaatctaaatatgaagaagcttgtgaaaaaaaaattaagattattaaggttctatatgataaaagtaatgttgaagagttggatatagctgttatatatatagataaattaaaatggtttactaaggataacaatataattataccaaaagacttttcttcaaatataaaactggatatgcaattagcagggtttccatcgctaataaatgaagagaaacttgatttatcttacttaccaattgatgttaaaattcaagattttgtatgcccaagtattatgttgtcaataaaagatacatttttcactcaaagaatatatttggaagatgcaatagtcggtatgtcaggtggtccactatattgtgaaattaatgataaggtatatttttttggtattacaaaaaggatcccagtaaatgaaaatggagaggctatctacaattttatatttgttttacatatcgagtggtatatagataaaattaaagaattatacagtcgggatattatactgcctaaagaagaaatactaattgtagataaagctattaacgaaacggcgctggaatcgattttgctaaacagagaatggtttaatagtcgtttaaaagaaagtattgctaatttaggtgaacgttattcagaagaattagatattccaattaatgaagagaagatacttgaatatatttgtttcagtccaaaagataatagaaatgttgtaaaaaagttagaagaaattgaagaagttttaattaagaatataagtgaaaaaagcctaagtgcagttagcaatgaatttaatgtatgtaaaaatttcgtgaatgagtatattgaaaaaggaaaaaaatatgagcaagagtatgtatcaaaagtttttgataagttaattaaaatttgtaatgaagcagacagaaaaaaaacatctatatcaagaataaatattatagataaacttcataatatagacggcaaaaacttgaatacaaaaaatgaaatatatttttataaaaatataaatgaattagaaaaaattaaggaatatttaaattttatggttgaaccgtatcttttaattacaggagaaccaggaataggcaaatcgcattttattgcacactgtgctaaaaaacattttgagagcatgggtatcagtgtacttgtactaggtcatttactaaaaaatgataaaccaattctaactcaaatcaaagaagtgcttgatatagaatgtagtattgatgaatttttacatattttgaatagatatgggaagaagaataaaaaaagaagtgtaatattttttgatggacttaatgaatgtaatagtagatggaaagacgatatattaggatttataaagagagttgaatcatatccttggattggtgtaataatgagcttacgatcaaatattatggcagaatcagaggagcaattaacatcaaaatataaaatgaagaaaattaaattgcagggattgtcaaatgttgaaaatgcaatttctgaattttcaacgtattataatatacctgtaagtagaagtaacaacttggaatatatactaaataccccgttacttttaaagttatattgtatatcttattctgagcaagaagaaggaaatttcatttgcttaaagtctattataaatggttatatttcgcatgttaataagaaaatatgtttaaaaaaaggttattcaagtaagacaaagataattaagagaatgataaacatatttgttgatattattctggaaactgggaaacgtaaagttaactttgatgattatgagatgaaattaaatcagtcagatacatcagtgattcaaaataacttgattgacgaattaattggagaaggtattttatcagatgtttgcgaaaaaaaaaatggtgaagaaatatattggattgattttgaatatgaattgtttggagattattttattactgatagaatacttgaacttgaaaaagtggaagaatttaataatagtcaacaattatctgatttatttagcagtgaaaatcaatattttgaatttctttcagattcaagaatacttgaaatgttaacagttttactcccagacataaaatgtaaatatgaagtgggaggatttgaaataatcaactggccatatgagattaaagaacgcatttataaagatacattctttaatagtttatttttaagaaatcctaaaaaaattgatcgtgatttatcatattcatatttacttaatactaatagggttcttttttatgatcacgatagatttcatagtttattttatgtagttctgaagttatgtgtatataaagaacattgctataatattgaatttttacaaaatttattttcggaatttaccagtagtggatttcatcgtgaatggactatattcactagtgagaaactatatgatagtgaagagttcaataatgtactttatttagcattatctcaaataaatatgctaagtaaaagagaaaagaatttgctaggaataactttgtcctggtgtttagttagtctagatgaaaatgttactattttatgtgagtatgctcttttgagaatgtatgaagaggatataaatggattagttgatattttaaaatatttttcttttattgaatttagtaaagctgcaataatattagaaaaactttttttaatatctatgcattgtatattctacagtaatgatattgaaggaaagaaagtaatgtgcaactatgttataaatagttttaatattaaatcgtcgttatttcaaaagtattttatgattcatgagtatgctatgtatattttggactatgcggaagaacatgaattagttttaagttcttgtattgatgaattgaaaaatcaagaggttggtactaagtttgatgagtttaacagttgtgatgttggaaaatacattaaatctaaaactagagaaagagacgatttttatgcagcttatcatattaaatataatgaaaatgaagactatgaatttgaagaatatttcacatgtaataatgatgtggtttatagcctaatgtctttgtacactgaaattgatatagaatataatcatatagaatttaaaacagaagaatttattagtttgatattacctgagtatagaaaaatattttgcgagaatgtaattagtaaaatatttgaatttggatacaattatataaaactaggattttatgatttaagtttattcaacgagaaatctactgcacaaatttatgaacagatggcatttaatattgtttttatgaaatatttaaagaattgtggtcttataaagaaggataagtggttagagtcaagtagtagtaaagaatatagtgctttatgggaattgccatattatgaaatatttgatgtttcttcggttgattatcaattttatcaagatggtatagatgataatttgtattgtgctgatgaattggtacaaatgattgaaaatgacaaattcataaggattgactcatgtagatttagaagtaatagaattaatgtatacttattgaaaataagtgatgtttctatatctaatattttaagagttaaaaattcacaatcaattattgaaggaatttatttttcagagatatttgttagtagagggttttataaatattttgaagctgaagatattaataatgaaattattcctgttacaagaagttatttatgggattatgaacctttttctagttttgcaatattaaatccagtactttataatgaaatgaatcttttaatttcaaaagacaagctttattattatcatgaagataaaatagtatgtaaaaacattattaaagagaatagtcatgataaatttttaatagatgcagaatttttaagagattttcttacttcaaataaatatagtattgtatggatatataaagatgatgaaagtaaattagaaggaaaaagtaatatgatacagtatgatggtcaaaatatacgtagaatttaaaaaataattgggatttaaaaatagaaatttgattaaagctaggccaagtctagctttaatcaaacatacaatttattttctcatattccttcttattcttatctttattaatctcagcataaacaagcatagtcattttaatatcagtatgaccaacccaatccattacagtacgaggattaatatctttacttaagcagttagttataaagatatgtcttaaactatggtaatgtatatctgttttaattccagctttttttaaagcagtttttaaatgtctattaggtttcttactatctatataatcaccattttctttacagaagattaggctattatctaaatataattcaccgaattttaacttattttccatgttcttttttataagaccctttattataggcttaaggacatctggaagaggtacttctcttatactagttctagttttaggaatagttactttattttcatatatttttttaccatctttatctctttcaccggtccaaacatatttaacggatttgcttatttttatattcatatgattgaagtcaatggcgttagtttgtagtgccatggcttctccaagcctaactccacacattaagcccattaatattattccttgcaattcatcagtttcaagagctgctataaaacgcttttggtcagcttctgaaatataattttctttttcttcaataacattatgatttttaggatatattaatccatctacaggattagattttattttattaattgattttgcgtagttaaaacagttacctatacatctattcatggtttttatttgagaaactgtatgattttttaataaagctgtagttattttttgaagtgataaagtatcaatttcagataacttagcatcattaagctttttattaggttttatataatttctatatatacctgcccatttttcaaaggtagaatcttttagtgaaggtctcttaatattccatagccaatcatagtagaaatttccaagtgttgaattatcgctgttattaacaaagttatcttgaaattctttcaatttttcttttgcttctttttgagttttaccataaatagcatttcgtttttgttttcctgttaatggatcatacccagtagttaacattatgcaccagtactttttaccattcctagtgacccattttgcagaaccctctccatttgatctttttgccatagtttttcacctacttgaaaatataattaaataaaaattaggacaatagcttttgaaactaaaatcctataatgttattttgtgcatgttgttacaaatctattcttttcatatttttttgattgaccaggaattattttttccatttcattaagagaatctctttcatatgcttttaatgttacaagtctataaaataaaactgatagctcttccatatcctcttcactaatatgatctgattcactgaaagggcatatagataaaataaacttaaaatattcatgaggactcattctagatgtttttctattaaacaaatcaaaaaaatattttttatctagctcatccatttcttgttcaaaaagaacacgcttttcttcagcagccaaaatattattttcaacatctttgtctatagcatttaaaattcctaatttatttgaataatgtgtattatcactatcttctaataaatcagagatatataaatttaaactatgtgctattatttctaaagttgatattgttggagttcttttgccattctcataattataaatggcatttctagataatttacattcattagctaatttttcttttgatatcatatctccatttttacatttgtaaactaagctttcaatataatcaaaatccatgtagacctccttaatttataaataaacttatagaaggcatgataaaattacctctacatctagtatatatgacaaaatcacatatatcctattatgaaataaaaataaattagggttatgcacttatgaggattttttatttaataagttcttggttgcagcatagcagcttcttctataggtgtataatacggaggtgtataaatgagtaattttatagtagcggtaggacatactgcaagtggaaatgttggttgtggagttgttgccagacttgatgaaagccaatgtactcgtgagattggatctttagttgcacagtatctagaagagaaaggccacgaggcaaatttacttagggttgataagagtaatagctataactgtcaggattgctatgaaagagcaaatgaagctaatgaaatagctaaaacagtaaaccttgaactatatgttgaaatccatattaatgcagggggaggtagtggtccagaagtattgattacaggaaaatcggaagtagcaaatcaatatgcagctaaaatatcaaatgcattagtaagtactctaaatttacctaatagaggagtaaagacaagaaatctaattgttcttaacaatactgttatgcctgcaattttagttgagtgcctatttgccgatagtgatgatgcagataaatatgatccggaagtaattgcaagtgcaattgttaatggtttagttggagcagattgttcttgtgatgagcaatgggtgagtggatggaatcagaataatgttggttggtggtattgtatagatgtcattaataaatattattatacttctcagaatggctggaaggagatagatggagaatggtatatatttgatagtaggggatatgcattgcagaatgcctggtattacgatgaaaattacaaggtttggtactacttagatgaaagttgtaaaatggttagaggcagtaaggataagcctttgtgaaagtggatagacagtgctttctatgcttttaatgaacgtggacagatgtactatgattgttttactcctgatggatttgtagtagatgctgatgggttttggataaaataaatacttttatctaaaattataagttggtaataaataaaaacgtttttcaattagtctgaaagcatttattataatgaatattttataagttgaaaatattcgaactatggtgctagtttattgaaatattgtattcacagtattataaacgaagaaattttaaatatagataaagaaattcaataatgttaaaagaagctatttaataataaaaatattttatccattgagcttaataagtaagcagaagaattaaagttccgaaattattaagttataataaacattaaaagaaacataaatatactagtccatatttaaataaaatcgcgtagtaacaaaaatagtaacaaacacataaaaaaagctgtactacaaggcacataagccaagtaatacagcaatccaccaaaataaatggtgccgctggccggattcgaaccggcacgatatcactaccagaggattttgagtccaccacgtctgccaattccatcacagcggcatgtaaactgacaaaaattattctaccatgtcttaaagaatatttcaataggtatttttaatttatttttatttttggaaaattaatttataatatccatataaaaatgcataatgaaagtattagacaaaattttatctaattaaagttaatataagatttttattcatttgtagttcggattttcaaataaaagtagataaatgtgcataaatttttaaataaaggttgtggggaatcaaatcatttgctagaataggaatagggaaaagtgccccactgggttattttatgcccaactacaattttaaacttagaaataagatttaataatttgtaattatctattaattagggaggagcaaaaatatatgatgtattcaaaagaagttgaagaaatgtgtgtacttgctaaaggtcctaatcacggatcagcgccaattcctgtagaaggaagatgggttcaatctaaagaagtaactgatatatcaggattaactcacggaataggttggtgtgcaccacaacaaggagcttgtaaattaacattaaacgttaaggatggtataatccaagaagcgttagttgaaacaattggatgttcaggaatgactcattcagctgctatggcttcagaaatattaccaggaaagactatattagaagcattaaacacagacttagtttgtgacgctataaacacagctatgagagaattattcttacaaatcgtttatggaagaactcaaactgcattctcagaaggtggactacctatcggagcaggacttgaagatttaggaaaaggtttaagatctcaagttggtactatgtacggaactttagctaaaggaccaagatacttagaaatggctgaaggttatgttactgaagttgctgtagacgaagataaagaaatcatcggatataagtttgttaacttaggaaaaatgatggaaagcattgctaaaggtatggatgctaacgaagcattagaaaaagctaaaggtcaatacggaagagttgctgacgctgctgaattattagacccaagacataaataattatttgtaaaggaggatttttaaaatggcattatttgaaagttatgaaagaagaattaaccaaatcactccagtattagaaaaatacggaatgaaaactatggaagatgctaaagcagtttgtgctgaagttggagtagatccatatacaatcgttaaggaaactcaaccaatcgcattcgaaaacgctggatgggcatacgttttaggtgctgctatagcaataaagaagggttgcactaaggctgctgatgctgctgaagcaatcggagaaggattacaagcattctgtatcccaggttctgttgcagatgatagaaaagttggtttaggacacggaaacttaggagctatgcttttaagagaagaaactaaatgtttcgcattcttagcaggacacgaaagctttgctgctgctgaaggtgctattaaaatagctgaaaaagctaacagagtaagaaaagaaccattaagagttatcttaaacggtcttggaaaagatgctgcattcatcatttcaagaatcaatggtttcacatatgttcaaactcaatttgactactatactggagaagttaaagtagttaaagaaaaagcatactcaaacggagaaagagcaaaagtaagatgttacggtgctgacgacgttagagaaggtgttgcaatcatgcataaagaaggagttgacgtatcaatcactggtaactcaactaacccaacaagattccaacatccagttgcaggaacatataagaaagaatgtatcgaacaaggtaagaaatacttctcagtagcatcaggtggtggtacaggaagaactcttcacccagataacatggctgcaggtccagcttcttatggtatgactgatactatgggaagaatgcactcagatgcacaattcgcaggatcttcatcagttccagctcacgttgaaatgatgggattaatcggagcaggtaacaacccaatggttggtatgactgttgctgtagctgttgctgttcaagaagctttagctaaatagtctgaaaatcaaggttttactggtttaagagtgaattaattagctaatataaatactcacactatattaatttaattattaatgggtgtgggtatttttttatacatgattttagtacccacgactttagaaaggggtgctatttttttatgataaaaatgaatagaaaatatattgaatatttgccagtagattgtacttatttattctcaacagttcaaggtgaaaaatgaaagagagaggacttacaagagctatagaagactacaacaaatcaagaaaaatagacagtacatcaattcatgcgtttaggcattggtatgcaaaaaaggcagttatgaacggaattaacatagttcaactacaacatttattagggcatagtaatttagaaattttgaaacattacgttgaaatgttaacagaagatttaaattacgaaaatattgcacaaaatcctttggaatctattaagttggaaaattctaaagggaaaaatattaagttaagaaagtaggcgttgatatgcaagtaaacattaatcataataaaacaactaatggatttaatgaaagaataattacattagacatatatgaattgaaagattaaaaaagattattaaaactttaaaaaactaaaaaaatagatagattattaccatgttatagcctaagtccttcataaggatatggcattagagcggttcagggtaacttaatcggaggtagtcaaaatattgaaagatatgatatgtagtagggagttgacgcatataaaaagactatacatagagttttctatgtaaattatgtttgcaacggtacgtgattcgtataacacgtcgaggctcgaaagagcgatattgtaatttcttcagtatttttttgagttgctggagaattgcgtctaactcagataaaaagcgtatagtcacttaggtatgaagtcaagcttaactttaaaagtattcagtaaattacaagtcctttagaaaaacttcgaaactgaataaagttgttttgaattattgacttcatgaatttccttatttttataatatgcaacaatatgtttgtccaaattttgtgatagtataatcataaatttattacttggggagaaaaaacttaacaacttatttaaaatagattttcttaggaatattctatattttaattgaaataatttaaaattgttcacaataatacctctttttatttaatttgatttaacccgacttttacattttataacataagaggaaactaatcaaagaaaatcgtattacaaataatgataattttttacgataatattacaggataaaaatataaattaaatagatttatataatttatttaaatggaaaaggataacttgttttactagccaagttatcctttaaaagattattatatttttttaataagtagaaggacaaatatttaataagaaattatcttacattattattatagcaaatagtcattacaaaattatgttaaatatgttaattaaatataaacaatttcttaaataaatttaaggcttggtaaacaattgaagaaaaaaacaacctgcttaggggagcaggttgaacttataaaggtaaaatacatttaccaatacgggggtaaaataataatgctttaattattttacaattactattataaaatacaaatattaaataattctttattacttattaaattaatgtgaataaattaataatacactacaaaaaaagatgacttactttagggggataagtcatctttgataggagttttataatatgttctagtcactttacaataatattataggataaaattgtaaattgtgtcaatatataaattctataataaaaaataaaaaggataatctgctagggtgcaacaaattatcctgaatactgtgttatatatatttaataggggtaaatatatatgaaaaaagttttatcaaccttatgtctttattataagtggtatttgtgacagtattatgtcaagttaataaacttaatataaacattttataaagaaaaatcaaataatacaaatatgtttatatgttcctagttaaatttattcatagaaatatatttacctagaaacatagatacaaagaaaaatatatacatatataaatatttataggaaacatgcgggttagaggtgaaatttaaaaatggtttttaaataatagctatcttttgaattattatttatgctaaaattatacataaaaggtatatttataaatggttgtgatataagcaatagagatgttataaaatgagcttaacgggaggaaagaaaatggcttcgaatatagagtttgtagaatatgtatgcgaacagataagtggtgcaggaagaataacgtatagaaaaatgtttggagattacggaatctactgtaatcaaaaaataataggattaatatgtgataatcaattctttttaaagataacaaaaggaggcagaaatttattatgtgaagttatagaagcccctgcttatgaaggagcaaaaccttcctttttaattgaatctttagatgatagagactatttaactgaagttgtatcagcaacctatgaagaattgccaatgcaaaaagttaaaaagaaaataaaagggaaaaaataataggggtgaggagtttgaaaagggcgagagtagcagaaataacagcagaatttaattctaatataaaatcggtttggaatatagtaacaaataataatgactatagttggcgtagtgatattaaaaaaattgaaatttataataatggtaaagaatttattgaatacactcataacgggaatgctacaaagtttattatatccaaaaaggatgaatatagtgagtatgcttttaatatggaaaataaaatgtttactggattttggaaaggtagtttttcagaaaaagaaaatggtggaactaaaatagtatttaaagagaatgtctttattaaaaatccttttatcaggattctttcatatttttttatggatttagggaaaatacaaaatacttatatttcagatttaagaaagaagctgggtgagtaatgaatattagagaacaaataattaaaaaatattttaaatcttggttagagaataattgttcagtattaaaagatatttttgattcaaatgtaagttatagcgaatgttatggtcctgaatatgatggaatagatacagttgaaacatggtttaaagaatggaataaacgtggaaaagtattggcttgggatataaagcagtttattcatcaggggaatatatcagtggttgagtggtattttaaatgtagatatgatggagaaattgaagaatttgatggagtatcgcttattgaatttaatggtgataattatatcgtaagcttaaaagaattccaatctaaaattccacattattatccttatagtaattaaattatggtttatattgataagttacatataaggagaagctatgaaaagttctgaagggcagcttaaaaatagagttgtatacaattatagagtagataaatgaatatactaatttaaatgaagattaattactagaattattgaaattaatctttatttaaattattttttataagttattgacacattcttcctaaaatgctattctaaccatagaataggtgggtggaatgaatatgacacaaattgaggtgatacttttatcacttttatatgataaagattattatggatacgaatttgaaactgtaatagaacaaagaaatatgagagggtggacggatattggattttcgtcaatttataattctttgaataaacttgaaaagaaaggctatattggttccagatatgaaaaagaatatggttcgcctaagagaaaagtatatttcataaaagaagaaaccaaagtaattattaggaatcagattataaaaatgataagcgaatataagaatgaccctagtgaatttgatataggcttattattttcttatttagtgaccaaggaagaatttaagaaagctttaattaaccataaagaaaatttgaaagatagaaaagaattcttaaataaaagatatgatcagcatcctacggcaaaggagagaccacatataaaagcattgtttgaaagaccaatagcatttatagatactgagatttcttggattgaaaactttattaatgaaaatttttaggcaaagctgattacagtggaggtgcttatatggagaataaaaaagttttaaaaattgttttttcaagcgtaatttcagatgctggagaagtaacacgtgcaatagaaatagcggatggaattagacttttctgcccagaagattatgaagtagatataacttttttatcaacaggaagcgtttttgaggataaagtaatttcaaatggatttaagatttacaaatgttcaccatcgcttccgggaatgggatttcgtgaagactttaaaactaaaggtagtaatataataggagaagtaaagcttgcaggtgaattgctaaaaggggagatagatgcttttaatgatttaaaaccagatgtagttatatatggattcaatcctatagcaggccttgctagaagaatgattgaaaagccaataccaggaatttgttatatgccgatacctatgcaaaaagacgtatatcttactacgttaatgaaagatgctccagataatattaaacctctgacataccttcctttaaatttccggaaaaacattatgaaattaatccctatagcaataaagttgaaagtaccagcttttgttcaaactaatattattgaagcactcaaggaatttcaatggaatggatctaaagttaaaaccgtgttcgatatgcttgaatcagatttgacaataataaatgatcttgaagaatttaataaggagcataaactccctgataattttaaagttgtaggaccattatatgcatcagcaccaagtaattcaaaaatagatgaaaatattttaagaatttttaattcagagggtaaaagacttaaagttttctgtacgcttggaagttctggaaaaaaagaatatttatttgaagcaataaaagctctcactcaaggaataggaaaggaatggagtgctgtgattttggcgcctaaagctgtatgcccaattaaggaagcaatcgaatgtgcggggaatagccctaatgtttatattacagatgaatttgtgccagcaactttagtaaacggacttgcagatgtggtcgtatctcatggtggtcaaggaacagtacaaactgctattgcaagtggtactcctattgttggatttgcaatgcagccagaacagcagataaatcttgataatgtagtaatgaaaggtgctggaatacgaataccaattaacaggtggaatgcaccaaacatacaattagctataagaaatataattaaagacacttcctataaagaaaatataaatacattaaaaaaattgttggaatcctcagacggtaagaaaaattcagcgcttgccatatgggattatatacttaataagttaaatcaacaaaaatgattggaggataagagaatgagtgatgtgtcatcagttagtaatgcatttaaaacttttatgaaagaggcgccggagtatcaagagatatggatggagacagttcaaaaattagattcagtaagtaaacttgattcgaaaacagaggaacttgcatatattgcagttttagcttcttcaagacttgaaggtggtctgccttttcatgttaaacatgcaaaatctcttggggcaacaagagaagaaataataagtgctgttctaataggattgccagccgtaggtaatatagtaattcaatcattaccaatagcaattaatgcgtatgatagtgaataaatatggagaatttattttagtttcaagtattatttttatagaataaaataatattatattaaaataataatatttataaaatattacaggtaactagataattttttaacgaatattttatgtaaatttagattaataatgattttaaacgacatataattacagaataattgatgtattttgttataaaacatcaatatatagatgaaaatgtattacgaaaatacgtgaaattatgttggaatatggtagaatataagtggatataaaaatagggtataaaaaatatggtttgtgagagatggtaatcaccaaaaaaggctgagtagttaatacttaagcctttttttgatattgaattatatgattgtcaaatatttaacttattatatgaatatagagcgattttgatataaagaattacaaaattcgtcatggaattagagtgttacacaagtttattagaattattagttttatatgaattaaatatataataaataataaaaaggataacttgtataagggaatcaagttatcctgaatactgatttgttgtatatttatttaataggagaacaattaatatgaattgtttataatattataataaaggataattgtggcaatattatgtcaattaaaaaaagatttctattaaaattatgagaatattaagtgccagtgtactcaatttaaataaaaggaaaatagtgaataaattgaataattcaacaaaatatgctatgatatacctatattatgtatagaaaataattactatgtagatgaggagtgtgggtattttatgaatataaacaatgaacttaagaaagttataaatgataaatttaagagaaattctgaggttgaatttatcgcaggattgaaagatataactttatctgatattgattatattgagaagttatctgcagttaaaaatttaaaatcaaaattaaattatcaaattgtggacaatacgtatataaaaattgattgctcgttgtaaaaaatataagattaagaattttaattgattttatataaagaattatattttggtatatgagtattataataaagggacttaataacataagcgaatgattttacccctataggatagaaaattaaattttatcctataggggtatttagcgttagtagctttatccgttttcttattgattgtatctattttgtttagttaattgcataactaaaagttgcgtgtggaagaatacatttattagaaggaagtcaaggaggtgaatttatgaaaaatgctagaaaacaaaggagggaaaattatgattaatgattatttagaaataagaaatgcagaggggatgcctaaacttgtggatgcaaatatgtctctaggctttttactatatgatagaaaaaaagaatgacttatttaggggaataagccattctaaaatactatttataagtatttttaaattagggttaataataatgctttaactactttacaaatattattataatagatttatgttacagaaatgttacagaatgataaatttattataaataatcaataaaaagttgattaaaaaattaaaattttagcaataagggggagtacaactgatgtattcgcatgagattgattataagataaaaggtgacgatatacaatatgtagaaattgaacttgatcccacagaaactgtaatagcagaggctggagcaatgatgatgatggatccaaacatacaaatggaaaccatatttggagatggatcaaaacaaagcggcagcagttttatgaataaaattttttcggcgggaaaaagagtgctaactggagaaagtttgtttatgaccgcatttacaaattcgggaacattaaaagaaaaagtttattttgcggcaccttatccaggaaaaataattcctatggacttgagtttattaggaggaaaactaatatgtcaaaaagatgcttttttatgtgctgctaaaggtgtatctgtaggaatagattttagaaaaaagttaagtgtaggcttttttggaggtgaagggttcatactcgaaaaattagaaggggatggcttagcttttatacatgcgtgtggtgcaatagttgaaagaaacttattgcctggagaaacattaaaaatagatactggatgtttagttgctatgactaaagatgtgcattatgatatacaatttataggtggaattaagaatacactttttggcggggagggagtattctttgcaactgtaacagggccgggaaagatatgggttcaaagcttaccatttagcaggcttgcggaacgtgtatttgcagcagctccaacttctggcggaaaaaatagagaagaaggcagcgtacttggaatgcttggaaatattttagatggagataattagaaggaaaatagatttatactgatatatatatgatgggagtaacataagttatttatgattttacaacttatgttatttttttattaaaacaattaaaagtttgtcaccgattagggttaaaaactatatctttatatattataattaagaagggataaattaggtaaataataataagttatataataaagaaaataaaaggcactttacagttgataatcattatcatataataagtagaagaaaggagtggatctatatatgaatgagaaaaataaagatttaactaaaaataaattaatcggaaaagatctattaaaatatattggaccaggaattttagttacagtaggttttatagatccaggaaattgggtatcaaacattgcagctggatctaattatggttataaactactttggattgttactctatcaacaataatgcttataatattacaacataatgctgctcacttaggaatagtaacaggattatgtatttcggaagcaattaataaacatataaataaatttttaggacgagtaattacaataacagcaatgttagcagcagtgagtactgctatggcagaagtattaggagctgcaatagctttggacatgttatttaatattccattaaaattaggtgcattaatttctgctgtagtaattatatttatgctattttccaattcatacaagaaaatagaaaaagtaataattggatttgtatcaattataggaatatcatttatatttgaaactttcttagtgaatataaattggggagaagcaatacgtagtgcagttgtacctagcattccagtaaattccctaccaataataatgagtgtattgggggctgtagttatgccacacaatttatttttacattcagaagtaatccagagtagaaaatggaatttaaaagataagtccatattagagagacagttaaagtatgaatttatggatacaatgttatcaatgataattggatttataataaatagtgctatgattttagtagcaataacattttataataataatgttcaggttaccgaacttgaacaagctcaaacaatgttaaaaccattgcttggaaattcagcttcgataatatttgctatagcattgctttttgctggattagcatcatcagttacagctggtatggctggaggatcaatattcgctggtttatttggagaagaatatgatataaacagtaaaagcagtaagattggagtattaataactacactggttgccttagttattatattttttattagcaatccatttgagggattactttattcccaaatgctattaagtatacaattaccaataacaattttcacgcaaatatatttaacatcatcaaagaaagtaatgggaaaatataaaaatactacattagaaaagattgttttatggagtattgcaggaatagttactattttaaatattatgctattaataagttcgttttaaaacaatataataattcataattataagaggagcagttgagctccttttttggcgtgctatatttttcttacatgagttcaaaaagtagatgcgtaaaaagtctacatatatgaaaagagtgctaagcacaaccacaatcgccgtaatttatattaggagtttacaagaaatataaaaatgttactatgaagcagaatagggaatctgcttttattaggaagtttatatttaacttgctttattagaggaatgattaattaatgaataatttggaaaataagttaaaaagtatggtaaaattagaattaaataaatattgtagaaataataatttctgaaaggaactgatattaaatgagaattttagcatatagtcataggcgtgatgaaacacagtatttcgaagaatttagtaaaaagtataatgttgaagttgttttatgtaatgaggaaccaagtttagaaacagcacctcttgcaaaaggttttgattgtatcagtataattacaacaaatataaactcagaattagttggaaaatttcatgagttaggtgtcaaatttatatcaacaaggactattggatatgatcatatagatttgaaaaaggctaaggaacttggggttcgtgtagggaatgtgacgtattcaccaaatagcgtagcagattatactataatgttaatattaatggcagttagaaaagtcaaacttataatggaaagaagcaatgtgcaagacttttctttaaggggtattcaaggtaaggaattacctaacttgactataggtgttgtagggacagggaaaatagggaggaccgttatcaagcatttaagtggttttggttgtaagatattagcacatgatatatatgaaaatgatgaagtgaaatcaaatgctaagtatgtagatttggaaaatttatttaaatatagtgatattataacattgcatatgccggctacagatgataattatcatataattaataagaaagccattaaattaatgaaagatggagtctttattattaatactgcccgtggatcattaattaatacaaatgatttaatacatggaattgaaagtaaaaagataggaggagctgctttagatgttattgaacaggaatctaatatttattatagtgatctaaagggagaggctttaaaaaatagaaatttagctattctaaagtcttttcctaatgtaataataacacctcatgcagctttttatacagatcaagcggtaagtgatatgattgaaaattcaataaaaagctgcatattattctcagaaaataaggaaaacccatgggagatagatatataatattataaatataagttacaatacataaatcactctttcttgctaaaactattaatatttcagattaataaaatactaaggagagatgaaatatgtttgataaaatccaattaccatatgcatttgatgcattagaaccatatatagatgcagaaacagttgaaacacattatagtaagcatcttcaaaaatatgtagataatttaaattcgcttataaaaggctatgagcagtatacagaaggtaaatctttagatcaattgttagcaaatgtgaatgagttgccagaagaaattaggcaaggagtaatagatcaaggtggaggtgtatcaaatcataatttgtattttgcacttctttcgccaactcccaagaaagctccagaaggaaaattattagatgagatacataatacatttggtgatttagatactctaaagaccgaagtaagtaatgcagctataggtcaatttggatcgggttatggttttttggttaaagataaagacggaaaattatcagtgagaaatacactaaatcaaaattcacctgctatgaatggggttgttccaattttgaccatagatgtgtgggaacatgcttattatttaaagtataaaaatctaagagcagattatgtaaaaaacatatggaacttaatagattgggaaaaagtagaaggtctatatttaaattatacaatttaaatacttttaacgataaaaaataagactagagagttgatgtgtttctctagccttgttatatttgtaagaaatggataaaatttatttgttacctaatacaatgaatcattataaaaataaggtttccagttgttataaatcttttcatgccttatacaataagtaatgtcttcaaggtttatagtggagtttaaaaggttaagcttactgctaaaggaatcagagaaagctttaaaagcatcaggaatcgacttagcagataaattgaaagtttcaagcggttcaaaactgctttcaccgtttctgtttaaagatataatttcataagcatcattacttgcttcttccactaacttatttatatttctttttaagtttatatcataattacttggataagttacttctaagttaattctataacaaatatttctggcttttacgcaaggcatttcgctagtaatttcgttatcatccaaataacctattgtcttagtcataacatcttctttgatatcaggtatatctattgaagccagagttttagtatagacatccttacttccatttaatgaatattccttttgattatttagtaataatgatttatcacttctgtttaaatctatgcaatcattgcatttttcttctgattcagaatcagatctatagcatatgaaagaatctattcttcttaaatctaatccgaaatagacccaatttctacggaaccatctaaaaccagatactgtacgtctgttaacacttaataagaaagtccaatagttatttccattctcttcccaaatatatgtgtatttataaagacaaaatcttatagagttagaactaacagctttagcatttacaccaccgctaactccgactttttgaactccagaatcatttttttttgggacataattaggtggtggagatttaggtgctccaggaggattgaatacaccaccgccagggtaattaaaatttggagaattatcataatcaaaattaggaggattaaaattaaagttaggaggatagtttcctggaggcggaaaacctccactatttggtgtaaaaggtgcacgttttttatcagcagattcatctaaaattggtgaaaattcaaagctattaaagtcttcgaagttcatagtatcgtcactaatgaactcattatcaattaacatttatattttactcctcagaaattagttataaataatatattcatcagagtttcagattgttataatttacgttaatataattcttgaacttttatattcttacataaattggttgtattcttaaatatactagaatctaatttcaaaatcaatataggacgtactaggtaattcttcttcaacaatttcatatgctaagtttatccaactttcacatgtgttaagaattatcccatcgctagttacaacatgatccaatttatttagaataacatctgcatttggaataagaataacttctatatcgaagttgtatttatatagaagttctaatagccttgattttaatcttcctgtgttagaaacaggagagtcaagataaaagatagccttacgtatcttcattttatccaatcttttaccaatcaagtctattgctgtatctgttttatcaattaacttatatgttcctcgaagtccagccaaatctcggagagttccgtccatacatttaattagtgttgagttagacaaagctacttcaagagtaatgattatattaagaccatcaatatgtagtgtgctattttcgtatgtatctaatattttacgtttctgcctgctaataatatctttataagaagatgtgcttctttttaatgctaatctttgcctagcagaaaataaaaaatgatttcctacaaattcaacacttttatctatactataaccttgatttattaagtaatagatatccttttgagctttttttaataatgttaggttttcttcattaaattcaatttcgtcagatggaacaaagcctcttttaactatttgtgtcatataaatatacctcctaaagtagcatctatatctatataattattaatatctccataaatatacctcgaattataacatacttatgtaaaaataatacaaataaattatacatgatataatgaaatgattacttgtagcgagagtatagtagagggggagttaaaaaatatagctacagaaattctgttgataggaattattcctagaccagaaatctgtagctatattatcattaaataaagtggacacaacctgttgcttagaatcttcagcgatattttaatagattttcggaacaaaatatttatgatttcggtaagttaccacataaatttagttttagatttatactatgaaatatatcccaactagaaactggaacaaaagtatgttattcatttcggcgagttatattcataagttcaggttttagttgggttatctataagtatataattaataattagtttaattaaaatttagggatgtctaggatagcacctctatttcctgatgtaacaagagcagcgtatcttgctagataacctgtagttatttttggttttcttggtttccaatttgcttttcttcttgctaattcttcatcgctaactaagaagttaatagtgttagcgttaatatcaatttggatcatatctccatcctcaactaatgctatgttaccacctactgccgcctctggagaaacgtgcccgattgaagcacctctgctagcgccactaaaacgtccatctgttataagagcaacggaacttccaagacctcttcctgcaattgcagaagttggattaagcatttctctcatgccagggcctcctttaggtccttcatatctgataacaacaacatctccagcaacaatttttcctgtatttattgcttcaagggcatcttcttcgcaatcaaacactttagctggaccttcatgctttaacatttttggtacaacggctgaacgcttaacgacacatgaatcaggtgctagatttcctttaagaactgcaatcccaccagtttgactatatggatttttgactggtctaataacttcaggatttttatttatgcatccttcaatgttttcaccaacagtttttcctgtacatgttataaggttagtttttaataaaccaagcttatttatttcattcataacagcataaattccaccagcatcatttaaatcttcaatataagtgtgtccagcaggagcaagatggcaaagattcggtgtttttgaactaatttcattagctatatcaacatttaaatcaaagccaacttcgtgtgcaattgcaggtaaatgcaacatactattggtactacagccaagagccatgtccatagtcatagcattcataaatgcatcttctgtcataatatctcttggtcttatgttcttttcaagtaattccatgattttcatgccagcatgctttgcaagttttattctttctgaataaactgcagggattgtaccattcccttgaaggcccataccaagtacttccgttaaacagttcatactatttgcagtatacattcctgaacaagaaccacaagtagggcatacgttgttttcatattcatctaatttttcagctgtaatttttccagcattgtaagcgccaacagcttcaaacatacttgataagcttgtcttacatccgtcaacttttccggcaagcattggtccgccacttacaaaaattgtaggaatattaactcttgctgcagccattagaaggccaggaacatttttatcacaattaggaaccattactaatgcatcaaaggcatgagccattgccatagcttcagtagaatctgcaattaaatctcttgtaactaatgaatatttcattccttcatgccccatagcaataccgtcacaaacagcaattgcaggaaagacaattggagtacctccagccattgaaactcccatttttacagcttcaactattttgtctaaattcatatgaccaggaacgatatcattttgtgagctcacgatacctacaagaggcctttccatttcttcttttgttaaacctaaggcactaagcaatgaacgttgaggtgcacttttagatccttttgttattacatcacttctcatagtatattctccttacatatatttataattatcgcgttgtatgttttaattataagttgtatgatgtctgttgtcaattgtaacataagattaaaataaaaaagtgctatttctataaatataaagaattagcactttatcttattcatttggtatacctaaatctttcattgctctaataatatgaattttcatggcagtttttgcaccttcagcatctctagcctccagaaactccattatcatgcgatgatcatttaaagtattttgaagaattgatttattttcatcggataaaataacaccattatcaattgctttgtataatataggcatcagcttgttcataaattcattatgagtagcttttgcgatagatttatggaaggatctctctacctcggttcgatcttcgttatttaagatcatttcttcttcaagtcttccgtagtacaatattctttctaattccttatcagtggcgcgtttagcagcatagtaagcagtctctggttcgaaaattaatctcatctcatataaatctttaacatctaatttttgagtagaaagattttctaaccccatgctttcagtaatgttttttatttctgatacaaatgtgcctttgcctcgcctaatttctaaaatattgtgagcaactaaaatacgaatggcttctcttagagtagttctgcttacttttaattcagtagaaagctcattttcatttggtagtttatcaccaatattaaattttttatctatagtaatcatcgctagtatatcatcagcaacactttccgataagctttttccttttcgtggcataaacaaacctccttttaggttatgtttatataatataataaaagagtctagctttcaatagtgatgtctgatgtcttatgattaaagattcctataaatacaaaataaagctcgttgaagtgaatccaacgagcacatacataaaattagatttggttttcagggataaatgtagcacagtctgtttcttgagtatcgctagcatttttaggttgtacttctatttgttgtgcacaacagtgatcacctgacatataatattgacatgtattaacaacgcatttgattccttggtttggtgaactcattttttctggtttcatagttgttacctcctaataatattattttaattaacaataatattattagttaatggaatttttttatacgaaaaatgtaagttatatttttcaaaaaatgactaaagatattttgtttattactttaaaaatgtattttttatcttttcgtgccactaattgtccattgatacgattacatgattatagtaatatataattaacaaatagattagggggggtacaaatgacatttgtaataataacagtatttgtgatttattcgatggtgcgtaaaccaagtaccgcatccaataaagagaaatagatttttatacaatcaaaattgtaaagtttaataaaaaataaatatataatttatattagaaagagtagcttaaacgctgctctttttttaatgttaaggaataaagtttagcattaacaatttttgcaatgcagaaattatatattatacgtatataaatggattaatgaatgcttatgagttcaagctagtaataacatataaattggaatgacaattaagctaaaaatagttgttatgattgtatttatcgtagcatattcgtaatctgcattataacgtttagatactattgctgtattagtcatgactggcattgctgcttgaataacaaatacttctttcataagtaaaggggtatttgcaaaattacacaataacaaaattaatataggagaaatgacaaaccttcctaaaagtattgccagcatgtcccagctaaatctaaattctttgaaattaacagagtgaattgttatccctataaacaacatagctaatggtgttgttaaattaccgaaatatttgcaagtgtctaggacaaactttggaagatggatatcaagtaatataagcaaaacagcaaacgtaaagcttaggagtgggggggacatgatacgttttattgtatcaaaggaaaggatattggcattgttagaatctccatcacgactaatttcatatacaccaagggtccaaaaaaatgtagtatttgctatgtagtataataacacatttgggatgcttttttcaccaaataaagccatattcactggaagaccgataaatatagaattagatacaaagaacattgatctaaaggtaccaattcgtttctttttcactttaatagctttagaaataattacggcaattatataaccaatagccatggaggtaaatggggcgaataatccaccaccaagactcaatagtttctctttatcaaagctttctgtaaattgtgaaatcatgaggcaggggatagcaagattgcacactaatcttgaaaaaagctttgaagttttttcatcaaaccagcctttatgagataaaaggaatccagtagaaatcatgagaacgatactgaatacacttcctaatgcattaaaaataaccattataaactctcctttaatatattttttaattaattgaattaaagaataaaggattacactttgacttatataatgaaatcctttgacaaaatgtttttcaaatgttttaaatcattgtctatatggttgtacatagctttatacgctttttcttcatctctctgtttaatataattaaatatttcaagatgatgattgaaaatatcaatattacgctcaggttcataaacatcgatagatctataaaaataagtaagcgaactcaaatctttactcaattttttaagatgattattttggctgaaatctaagattaaatcatgaaatttagtattgagttcaataatatttttagtaagtgtatcgtcaaagttatctatattttttttgatttctaataatattttttcaattttatctaattctttgttagatgctttaagagtagttaactttgcagcttgagattctaaagcttggcgacattcataaatattttcgatgtcttctttggttggtttataaattgtaatttttgatttatctccaataacaagtagtccatctttttctaaagaacgtatggcttctcttactggacttctgcttatttgaaattcgctggcaagtttggattcataaatcctatctccgggttttaaaataccgttaaatatcatagcttttatagaattgtaagcttgatcatagtaagaaggcgctttttcaattttatatttttccattactttatcctcctatagattgtgttaaaacgattaattaatttcaatatttatacaatgtatactgtcgacaaattaattttagtataatctacaaataccaaataatcaatataattgaaatcaaattgtacaaataaataaaaaacctggtgaattaaatttataatctaccaggccagataattatattagtctattttatttatcttcttctatgatgtttcttatgttcaactaggtcgatagcgccaagaaccatgtgagctgcaccgaacccaacaactccagcagcgataactggtgccatttctactgccaccatagctgcacctacacctgttacaactgtacctaatgcggttggtattgctccttctcgaattctcatatttattcctcctttaaactaatagagtttaataatagtatgtttttatctaagatttattatttacattagtaactttccacttaaaatgatttttatgctaagtaataatttataaaaaatattaaattatctgctttataaattttacttatcttcggtttgcttatcatatgctataaggcatactggaggattatggtgttcatttattctgttttccatttgtcttatgaaatatatatcttctgtagataaatcactgaattcattatcaaatttactgctatcattactcatgctatcactcctttcataagtatagtatggataggtagaaagattttaatctgaaaataataaagtaataagctttttattgtatgtatcatataagtgtatatattttttcagcgtggcaaagataattttaataaagtataaaaggagtgttgtttatatgttatctacaataaaagccaacaatttaataaatgaaaaatctccttatttattgcaacatgctaataatccaataaattggtattcatggggggatgaagcatttgcaaaagctaaagaggaagataagcctatttttttatcgattgggtattcaacttgtcactggtgtcatgtaatggcccacgaatcatttgaagatgaggaaattgcaggaattatgaatgatagttttattgcgattaaagtggacagagaggaaagaccagatattgatagtgtatatatgacagtttgccaagccttaaccggccatggaggctggccgcttacagtgataatgactccagatcaaaaaccattttttgcaggtacttattttcctaaaaaggctaaatataatatgccaggacttatggatattttaaattcaataaataagcaatggaaggataataaggataagcttatatcatctggtgatagtattttatcagaacttggtggctattttgatggtgaaacaagcaaattgaagttgacatctaagacattaaaaaatgggtataatcaaattttacacgcttttgaggaaaagtatggaggctttggtgatgcacctaaatttccgacgcctcatataacaatgtttttgcttagatattataaatctcataaagaaattaaagctttagaaatggctgaaaaaactttgatttctatgtatagaggtggaatatttgatcatataggttttggtttttcaagatattctacggataataagtggttggtaccacactttgaaaagatgctttatgataatgctttgcttgttatttcatatttagaggggtacgaggtcacaaaaaatgagatttacaaagaggttgcaacaaaagtgctagaatatgtatttagagagcttactagtaaaaatggtggattttactgtgctgaagatgcagatagcgaaggtgaagagggaaaatattatgtttttgaacctttagaaattttaagtgttttaggagaagaagatggtacgtattttaatgattattttgacataacttctgatgggaactttgagggcaagagcattccgaatttaataaaaaataaaaactttcataagtcagatgataggataaagttacttagtgaacaaatacttcaatatagaagtgacagaacggaattacataaagatgataaaatcttaacttcatggaatggacttatgatagctgcacttggaaaagcctataaagttattgaggatgaaagatactttgaatatgctaagaaagcagtagagtttattttcaataacttgatggacgaaaataaaaggcttcttgcaaggtatagagataaggattcgcgtcataaagcttatttagatgactatgcttttctttgttttggacttatagagctttatgaaagtagctatgatattgagtttttaaataaggcgattgaaataaataaggatatgattaacttattttgggataatgaaaaagatggattcttcctttatggtgaggatagtgaaaaattaattgctagacctaaggaactttttgatggtgctatgccttcaggaaattctgttgcagcttacaatttaataaagcttgcaagacttactggtgatttaactcttgaagaaatggcagagaaacaatttgattttatttgtggctcagtatttaatgaagagataaatcattcattctttttaatggctgcatcatttgctttaaatgaatcacaagaattagtatgtgttactaatgataaaggtgaagaagaaaaaatcaaagatttattaagtgaaagacctatttttaatttaacaacaataattaagaatgatgaaaatagaaatgaaatagaagatttagcaccatttcttaaggaatatgatcttataaatgaaaaatctacatattatttatgtaaaggaaaatcatgtatggctccagtaaatgatattgatgaattgagaaaaatgttatcaaaattataaggcggcgtagtatttagtaaatattaaaaagagtttttctgtaggattaaatttatttaaatacattttttaaggatgtatataataattttagaagttatatactccttattaaattctcaataatagctttattaattgtaggattatggatgcatattaaaaggagatgaataattaatctaaaattaagatttatttaagttgttataagaccgagttttagtataataattccaaggagaggataaatttatgataaatataagcaatataacaaaaagttataatggaaattataatgcggtaagcaatttaaatttggaaatcagggatggagaaatatatggattattagggcctaatggggctggaaaaacaacaactattaaaatgataactggaataatatcgcctacatcgggaaaaattgaaattaacggaattgatattagtaaagagccagttagagcaaaagagcaatttggttatgttccagatagcccggatatgtttttaagattaagtggaatggaatatttaaatttcatggctgatgtttatggggtttcaaaggaagaaagattgttaaggataaaagaaatatcaaaaaggtttgaaatggagttggcattaggagataagatacattcatattctcatggtatgagacaaaaggtggttcttatgggagttttgattcataagccaaaagtttggattttagatgaaccaatgacaggtttagatccaaaatcagcatttacattaaaagaaatgatgagagaacatgctgatgaaggaaataccgtgattttttctacacatgtgttggaagttgcagagaaagtctgtgataaagtcgcgattattaataaagggcaattaatatttaatggaacactaagcaatatgagaaaagagtttaaagagaatgaatccttggaagagatgtttttggagatgattcaagatgagtaggcttaagataataacaaactattttataagaaatgcatttgaggaaatgtttgctagtagtaagaaaatgaaacctgtattcgcagtgatgctaatgatatttattgtagtaatgttatctatgccttttactgtaataataagtgaaggctacggaccacttcatgctatgagacaggaaggaatattattatcaataatattgtcaattggggagagtgtttctttcatctttggaatgtatacaataataaatatcttatacttttcaaatgatattgaagttatattaccacttccttttaaaagcagtgaaatagtatttggaaagtttatggcagtgttaattaatatgtatgtgtatacatcaatgttgattttgccacttatagtctatggatttgtgtcaaaggcaagcttcttgtattatttatatggaattatagtgttattaataactcctattataccgatggtattggcatcgttaatatgcatgattcttatgaggttcactagcttatctaagcataaagatgcatttagagtatttacagggtgtgcatcactaatattgatagtaggattcaatctttttacatcaagttctggaagaagtacaaattcacagcaaatgattcaaagattttcagatggaaataacagcgcgataagtacgctaaatgatattttcataacaagtagattttcttcaaatgcgctattatataacaatgacattagaggcttgcttaatatacttatgtctttatgcctaagtttaatcattttcataatatattattatataggaggaaagttatatttaaagggagtaataggtatttctgaaacttatagcaagagggaaaatattttagaaaacggtaaggcagataagataataaaagaaaattcaaagttaaaagcattaattataaaagatgttaaaatcttattcagaactcctcaattctttattaattgcatagcgatgatgttttacatgccggcagtaatgggtgttgcatttttttccggtggtaaactatcagagtataggtatttattaaatagtagtcccaaatggaatgcgattaccatagcaattgcatttgtaggtggaacggtatgtataatgtcaggtggagcaggtgcaagtgcactttcaagagaaggtaaagattttattgtatcgaagtatattcctgtggaatataaaactcagctatactctaagattctttcatcattatttataaatgaatttgggatggttatagttgtcttaggactcttattagtaaacgtaagtcctatcataatattgctcgggacgatatcttcatttggatcaatacttatggtaactttattgggattatatatagactttaaatcaccaaaattggaatgggaaaatgaaaaagctatgtttaaaaataattatatacctctattaattatgcttattatatttatattaggagctggtttagtagtagctgccataatattgaggaattatgtaattatatttggaatttgcattattatttcacttgttggaagtagtcttttatataaaggcttattaaagaatgcttataaaatatataatgaaaaatagtcagaataagataaaaatgcattacaaaaatttgttttttgattttgtaatgcattttgaattaaagttaatttgacaccaacttagtgtaatgatataatcatttacagagtgtgaaggtcacacgaaggggtacaccaccttgggtgtattttttcgtgtggccttttttagttatattaaatatttaagaggtgattaaatggtaaaagtgaatggaaaagaggcagataatgcaactggattatcgttagaggactttcttatcagtgaaggatatttaatagataagattgtagttgagctaaatggtgaaataatgccaaaaccccaatataagcagacaaatattaaagatggtgattctttagaagtaattagctttgttggaggcggctgatgcattaataaattcagaaatatcactaatgtatattatcaacaataaaaataataattttactgcaagatctagattagaaaaggacaagcttttaaattaagttatttatttaataatttggttatacatattaatttattttaataatcgaattttatatactgctagttcttgctgaaaaatgctaaaggagagtattggaatgaaaaaagatgtattaacacttggaggacatgaattctcatcaagattcatactaggttctggaaaatataatttgaatttaattaaggctgcagttgagaatgcaggcgcacagatgattactttggcattaaggcgcgctaatacaagcggaggtgaaaatattttggattttattccagaaggtgttacattgcttccaaatacatctggggcaagaaatgcggaagaagcagttagaattgcaagacttgcaagagcaatgaattgtggtgactttgtaaaagttgaaataattcatgactcaaaatatttgcttccagataattatgagactattaaagcaactgagattcttgctaaagaaggttttatagtaatgccatatatgcatgcagatttaaatgtggctcgtgatttagttaatgctggagcagcgtgtattatgcctcttgcatcaccgattggatctaataaaggtttagctacaaaagaatttataaaaatattagtagatgaaatagatcttccaattattgtggatgcagggattggaaggccatctcaagcttgtgaagctatggaaatgggagtagcagcagttatggctaatactgcaattgcgacagctggtgatattccagctatggcaggagcatttaaacaagcaattgaggcaggacgtgcagcatatctttcaggactaggtagagttctagataaaggtgcttctgcgtcatcaccattaactgggtttttagaagattaggaggcagactatgagcgaagaacgtataaatcacatggaatatatggctgggatggaagtattagaatcagatgtaatggataaagtaattaatcacatggaagcttatgattataataagtatacagaaacagatgttagagtagctttggacaatgattatcgtacgatagaagattttgcagcattattatcaccagcagctatgccgtttttagaggagatggctcaattagctaaagaggaaacaagaaagcattttggcaactcagtttacatgttcacaccactatatctagcaaattattgtgagaactattgtatttattgtggatttaactgtcataataaaatacgcagagcgaagttaaatttcgatgaaatagagaaagaaatgcaggcaatagctaaaacaggtttggaggaagtgcttctgcttactggtgaaagcagaaaaatgtcagatgtaaaatatattggagaagcttgtaagatagcacgtaagtattttaagatggtaggattagaagtatatcctatgaattctgatgaatatgaatatcttcaagaatgcggtgcagattttgtaactgtattccaggaaacttataattcagataaatatgaaacacttcatcttgaagggcataagcgcatatttccatatagacttaatgcgcaggaaagagctctaaaaggtgggatgcgtggtgttggatttgcagcattacttggtctggatgactttagaaaagatgcttttgcgacaggggtacatgcataccttcttcaaagaaagtatccgcatgcagagatagcattttcatgtccaaggttaagaccaattattaataatgataaaattaatccaaaggatgtgcatgagaaacaactcttgcaagtcattacagcgtaccgtctttttatgccttttgctaatattacgatttctacaagagaatgcgaaagatttcgtaataatgtaattggcttagcagctactaagatttcagcaggtgtaagtacaggaataggaagccatgcggaagatgcagaagacaggggagataatcaatttgaaattgcagataacagatcagtagatgaagtgtatgaagcaattaagtctaaaggcttacagcctgtaatgaatgattatgtatatttataagattaataagatgtttatatctttaaacataggcaaagatagataagttgtaatctaaatatatcttaatactgaaataatttagtaggaatctctaattgattcctactttttttagataaatttattatactaattatagtttgacttatatatcagaattataaaataaatattatttatttttcgcttgaagacccaatataattacttcaagatatcctgcaaaacgcgaaacaaaatcaggtggggcttctagtagtgaaacagtttgaaactcttgacgttggtttttagaggatactgccggagaatataaactagaggcataataaatctgatattcattaaaaagtttaagctcatcttctgtcaggttaggaataaattttttagtaatcaaatttaatttaccaaagctattagcaagatcttgcttcaatatctccagtgattttgttgtcacattacttcttaatactgaagctaaaattgagaatagctttaaaaaacgctgattttcatacatttgttctgaccataacagacaaaaagttttaagttctaattgatcataatctttaagtttatcatatgtcttttttacccatttttctaaatctgaacttaatatccatagaaaaatttcttccttagtggaaacgtatttatataaatttgctcttgaaaaatttaactcattagcaattgaagcaagtgtgattttttctaagggctctctttcatatagctttaatgtagcctctatgatttgttcacgcctaatgcttttttgttcttcgtttcgagcacgttgaaattccatttctttacctccttactaattgacaattacatcatagcaaatgaatcataaacttacaagttactaaatgttactcaaaattcattgacaagttacgcagtgtaacttatacttaagtaagtttcatggtgtaacttatattctcgaaatcgtagatatgataaaaagtcataaattaatgagaagagacgtataaggaagcttaagtaatttagaagcaggagtatgtaaatgttttagcctatttaatgtctagtaatatgttaaacaacggggtgaacaaagaatgaaggataatagtaatgaacaggcaaatccatggttagcaatgatagttatcatagttggtacatttatgtcggtactaagcagtagtataattaatgttgcattaactaaaatgatgtctgtatttggagtaggattagatgatgtgaagtgggtaatgacagcttatacattagcacttggagcaattattcctttaacaggatatcttcaagatatttttggtgctaaaaaagtatatatagttgcattggcaatttttacaatagggtccgcgctatgcggatttgcatggagcaattctagtatgatagcatttcgtgtatttcaagctattggaggagggatgatgcagcctgttggcatgagtataatatattctgtatttccaagaaaaaagataggacttgcacttggggtttatggaatagcagccatggcagcacctgctataggaccaactcttggtggattgattatagaaaaaatggattggagactgatttttacagtaaatatcccaataggaataataggagtagtgttggggatgattattttaaaaggccaacctatgaaaccatttaaggcatttgatatagtaggatttttatcatctacagtaggtttagtaagtttgttatatgtacttggaaagggatcctcaattgattggggcgatatgataaatccaatattaattgcgttggggagtttaagtcttatattatttgtggttaacgaacttacacatccagacccactattagatctgagagttctcaaactatttgattttagtatgagcttagttataataactgtgttaactataggattaatgggagggtcatatgtattgcctttatttctgcagaatgtaaggggatatactgcgatgcaggcgggacttatcatgtttccatcagcactagttatgggggctttgatgccattaagcggaacgctttatgataaattcggagctaaacctgtagttataccaggtcttattatattagcactagctacatttaagttgtcaacagctataagcatgaattctagcaaggaatcaataatatttattaactgtataagatctattggattaggaatagctatgatgcctattagcactgctggtatgaatgtagtaaaaggcgaaatgattccaagagcatcagcattgaatagcactataagacaggtggcaagttctcttgctgtaaccataatgacagtaataatacaatcgaaaacaagttataattattcaaaacttgcagagcaaataaatatctacaataaaacagcagtaggaactataaattcactaacaaaatcatatatgtatgaaggtttttcacaagaaacttctaaagttatggcactatctcaattggcaaaaattattcaaggacaagcatctgtagatgctatggcatattctatttctgtaactggagctatagctgttattgctatatttttaacattatttatgagaactagaagatgatataaaaaattaaactataatagaggaatgtgttatttaataatatatatataaattaaaaagatattaatataaaaataatataaaattttactaatgaatttgatagacaaataagaaaatacttataaagtaaattgattaaaggggatagaataatgaaagtaaaggattttatgattactgatgtaatttccgtaagtaaagaaaatactattaaagatgtcatgagggtattagtcaccaataaaataggcggagtaccaatagtagataacaagggaatactttcgggtattgtaagtgatggtgatataataagaagcataaatcctaaagaaggaaaaatgtatgatttaatttcatatgtattttatcttaaaaaggaagaattagaagaagaaattggaattataaaggatactaatatcatgactattgcaaaatgtaaagatattttctgtgtttttccagaagatactatggaaaaggttttgtctattttctcaaaacataactttaaaaagataccggttatagataaagaaagaagagtagtaggagttattagtagaggcgatgtaattagatatatacagaaaaagattatagataagttgtaggtaatagtaaaaacttatctataataattatattaaaagtagaaataaagataacaattaatctaggacaatagaatataaaaataaaagtgagtgttaatttagaaaataatttctagataaacactcacttttttgttatggaattaagcagctttctttatggattttatatattctttgccctttatagaattatactttccttcccattttgatacaacaacaactgctagagaattacctaatacattcacaacagttctagccatatcaagtatacgatctattccggctataaaagctaggccttcggctggaattccaacagaaccaagagtggctagtaaaactacaaaagatactcctggcacgcctgctataccttttgaagtaagcatcaatacaagcattaaattaatttgagctggtattgataaattaataccatataattgtgcaataaatattgcggcaatagcttggtaaagagtagaaccatctagattaaaagaataacctgttggtactacaaaagttgcaatagctttaggacatccgaatttctccattttctccatgattttgggtaaaactgtttctgagcttgctgtgctataagcaagtataagttcgtcttttaaaattcttatgattgaaaagatacttgtcccaactaattttgcaattagtccaaatattagtagtataaataaaatcattgaaccataagttgtaactattagttttccaagtggaattaaagatgaaagtccaaacttagaaactgtcacaccaattaaagcgaatactccaaaaggagctgtcttcattatttgatttgttacccaaaacattgcatcagccgttccttgggcaaactgtataacaggtttccctttttcaccaattgcagcaactcctagaccgaacataacagaaaagaaaatgactgaaagcatatctccccttgtaagtgaatcaaaaatattagtaggtacaatatttataaatgtatctgcaaagctatgatgtgttacattttctgcagtgcttacataagcatcaatgctagatttagcaagctcttgcatatttattcctgtacctgggtgaaacacattagcaattaaaagtcctaatacaatagcaatagttgttactacttcaaagtaaagaagagtttttcctccaagtcttccaacctgcttaatatctcccgctccagcaataccaactataagtgatgaaaagacgattggaactacaatcatttttattagacgaataaaaatatctccaataggctttaaatatgcctcaacagctggatttccataaaaaaatccacctactataattccaagtataagtcctacaagaatttgtaatgctagaccaaatttaattttcttcatagtaaagtctccttccttagtttaaaatttgaataaaaataatattaaatatgacattattatcatttcgggttgcaaattattaggattacttagcaacattttgaattataacataaaaaatgaattttgtctctagaaaaaattcatttttaaaaataaagaatatattcttttcttgttgttcaattaattgaaaatatttctaattgttaattatatttttaataaacttactatggtgtatttacgagaagttagattttaacactaagagaaaagcgccaagataaagggcttaggatagaaaactgaacatattaattaatataataaatatatatttagagaattagatattgattttcaaaagagttagcaaattaaaatatgaaaataaatataggcaataatgcaaaccagataatatgaaatgtgtttattaaaccatagaatatgatacttacattaataaagtaattacagtactttagttgtttatcagttgcatctttcattctaaaatatatgaatacaaaaagaactgcaggagctaatatttttaataaaaaacttatagttggactttttactacttctaacatgaaaatatttgcttctacgtaaaaaccagtatttaagagtaaaatagtaaatattatgtctgtaacattcaggatatatagagctaaaaattttatttttatatttttaagagaatagttttttataaaagtaatcattaaaacacctccatttagtgattattaccacaatgaagatattgtataagctttattaattataggtagatatatattttttattagaacgtatattttgaactacattattatagatatgttcttattttctaagtagtttttatgttgctatatttttatagataggattcaaaatatcaaagaaatcaaaaaagctgtggataagtatagaagtaaagtttgaattaagaaaattttaaggaaagagcatggtataattgcaggcaaagaaaaaataatataataaagagaggagttcaagtaaatggacatatacacaataggacattctaactattctatagagaaattaatagatatgctaaagacttataatattgatactgttgtagatataagaggaactccgtattcgaaatataatgttcaatataataaggaaacaatagctgaaactttaaaaaaagaaggatttatatacatatatatggctaaagaacttgcggctcaaaggcaagataaaaactcttataataaggaaggatattctgattttgaaaaggtaattatggaagaagattttttaagaggaattgagaggctaaaaataggatgtcagaaaggttataatattgcacttcttggagctatgcaggatcctataaggtgtcataggagtatattagttggaagatcattaagggagaatggatttaatgttaagcatattttggatgactatactttggcatctcaagagaaaatagaagagaaacttttaagtaaatactttagtaataggaatcagattactatagacagcttgcttggtaacgaaattagcgaggttgaaatgattaaggaaggttatcgactggcaaataaagaaattggatatagagtggagcatttagaataatataaatcaaaattaatatataagacatatattaatatgtattactaaattaggattttaattatgaaaaaaattttatctaaagtattaagaggtattgggattaaaaaaaatggcattagagcagatatgtcgagtgaccgtattagctatgcagattatgtaaattctaagaattattctagtgaaaccaactacttgatttgggtagatactggaagctttaaagtgaatatttttaaaggaagcacaaataagtggaacctaattaatagttatttgtgcaccttgggaaaagcctcaacgccaacacctaaaggaacttataaggttggaataaagggactctattttggcgtaaataaaggatacaagtgttggtattatacacagtttaaaggtaattatttatttcattcaataatttataatttggatggatcggttagagatggaaggttaggtatgaagctatcagatgggtgtataaggttagccaaagaaaatgctaaatggatttatgacaatatacctaaggggactaaagtagttataaattaacctatatttatatatttggatagataaataaaagttaagagaataattatataaaattgcacttgtaattagatataaaagaaaacatattcacattaaatctagtatatggattttattataaaaattacaattattcagaaaattcaaaaaactattgcaattaatgatgaaatgagatataattaaatcaagataaaggtttaatttatcttagtgtactgacacttcaatccggcagaagagtatatctcaagagatatacagttggtgacgggcaacgaaaaaatcccggaagcaatgtacgacagacggtcgtacccagttggcggacaacgttaaaatcagtaactaagaaagagcaagtgaagttagtaagattcacttgctctttgtcttttgtaaagataataattgactattataattaaagtgtttaacataaatatccatctaaattttatattagatttaggtggaatttttattgtaaaataattttaagaaaacagtgattttcttgcaaaggcggggattaaaatatatactagtttgagatataaaatatattttatttttatctaaatgtattgattggagtaataatttaatgaagaaatttaaaaagatttatatagagataacaaatgtgtgtaatttaggttgcgatttttgccctaaaacaaatagggaacttaagtttatggataagaaaagttttcaacatatcgtaaatagcgtgaaatcacatactgattatgtatatttccatctaatgggagaaccatttttaaatgaaaatataaagagttttttggatataagcaatgaaaattcattaaaggttaatataactactaatggaactttaataagtgaagttaaggatgtgttacttagttcaaatgctttaaggcaagttaatatttcgcttcatagctttgaagcgaatgagggacatgttgagtttagtaaatatatagataatataattgaatttgttaaagaagctagtgaaaaaactaatataataacttctttaaggttgtggaatttagatacaaagtatactgctagtaatagcatgaatattgatatttttgaatttcttgaacaaagtttcgaaataaaatccagtttgagagaaagtttaaaggaaaaaaatagttttaaactaaaaaataatgtatatcttagtatgggagagaaatttaagtggccatcattgcaagttgaggagttaggagaaagagtcttctgctatgggcttagagatcaagtgggaatattggtagatggaacagtagtgccttgttgtttagatagtgatggtagcatagcacttggtaatatctttgacaatacattagaagaaattctaagttcaaaaagagctatagacatatataatggtttttctggaagaaaggcagtagaagaattatgcaaaaaatgtggctttataaatagagtaagatagtgggggcgttgttaaaatggaaacagcaattaagtcagtgggtatttttttattgatatatttttcgtattactatgtattgagattcatacaatcggtttttcaaggagcactgagtagtataaatgcaggaatggctaaatttatatatgctttaagtacaccggctcatgaacttgcacatttattagttgcaattttatgtcttgctaaaatagaacaagtacaacttttgccaaaaggaaacagaccaggatttataagatcaagagttggaagcagtatgccatttttaattagcattaaggaatttcttatagctatagcacctgtcataataaatataccattattcatatttatagagagtaaatttgtattgaaagataaagttgctgatatatctagaatactagatccaagaataatagtgagtaaagaaggcataataactatatttttatttctagtgttaataagtggaatagcaccaagtcatgaagattttaagggaatgataaaaggacttataattcttagtgcagttatattcggattatcatttttaacttcaaggtttttagatatgaagtggatgaatgcaaagccaatattaacagtactattatactatattgaattaatagtattcgtgttgataataaatgctattatacattataggaattgtttcaaaataacatggattatattaataagtgccataaaacatgcttttagaaaaagttgatgggcaatcactcttaaatggtaaatactttatacagatacttaatttgaacattgaaagaaaatttttgtataaatatagaaataatggctatactccttgataaggagtgattattatggtaaataaaaagaaattatttataggtatgacattagcattagtacttatattttctataacatattatttttcagaaaagtatataagtaacaaaaatgctaaaaataatcctgtatcatcaagtgaaataaataataaattaaatgataatataagaatttatttatatgcaggtgaaaagaaagaaaaagaattaacattatcagagttaaagaaagaattaaatatagataagaatttaacagaaacggaattatcaaaggcattaaaagataagggatatgtattagaagtagaatctaatggagaaatgacttataaaagagatgcttctaaagctgtaaaacctaataaatattatattggagaaaaagatggctttttagcaatatataaaactgatgataatggaactttatcaattgaaaatagcgaagatgtgtatactaatagtaaaaaagtagataacttaagtgagatagataaagacaaaattaagaattttgagcttgaatataattcaaaagacgatgcggaagaaagcttatcagaatttttatcataatggaaatctgataggtaaattttaattaataaaaggcatgtaagtattaaattactaacatgccttttattaattaaaaaatacattgttgaaagatttgcctgaaaatgataaagtataagttaggttttaataatgtagaaattagttttttagctaaattttaaatatagttatagatatagaaaagttggtgtgaaatagatgtacgaatatataaaaggtaaatatattgggataaataaagattatgtaatagtagagaatagcggtataggctacaagatatttacatcaggtgctacaatgtcctcgatgccaaagaatggagaggagattatgctttaccttgagcaaatagtaagggaagattttattggattatatgggtttgattcaaaggaagagctagagatgtttaagcttcttttaacagtaagtggagttggaccaaaagcagcattatctttactatctataagcagagttaataatttaaaatatgcaataatgattggcgatgagaaacacatctgtagaggtgtgggaatagggaaaaaaacagcagctagaattattttagagatcaaagataaactaaagccagatgaactagtggatagcagtttggaaattgatacaaaggataatgagaatgttatggcattatcagaagctttaagtgcgttaattgcgctagggtatagcgagaaggaagcagaatcagtacttaaaaagatagataagaatgatagtgtagaaaatatcattaaaaatgcattaaaggcgttgatgggataaagatactaagacataaatagcaaaaaattatacatatatgactcataggaaaagggggaggttttttggaaagaatagttaatcaatctgagatgcaagaagattttaattctgaacttagtttaagacctcaaaaaataaatgaatatataggacaagacaaagtaaaagagcgattagatatatttattaaagctgcaaaaaatagaaaagaagcattagatcatacacttttatatggaccacctggacttggaaaaactactttagccaatattatagcaaaagaaatgggtggggatttaaaaattacttctggaccagcaatagaaagagcaggagagttagcagcgatactaacaacactaaaagattatgatgttttatttatagatgaaatacataggctaaataggaatgttgaggaaatattatatcctgctatggaggattatgctttagatatagttataggaaaaggtgctacagcgaaatctataagaattgatcttcctaaatttacactaattggagcaacaacaaggattggaatgcttacatcaccacttagagatagatttggtgtgctttgtgcaatggaatattatacagatgaagaacttaaggagatagtaagtagaagcgctttggtttttggatgcgcaattactgaagagggtgctttggaaattgctaagagatctagaggaacacctagaattgcaaatagactattaaaaagagttagggattattcagaagtaaaatctaataagctagtatcattgaaagaggctagagaggctttagaattattggaagttgataatcagggatttgataaagttgataataaaatacttgaagctattattgataattttaacgggggacctgttgggattgaaacactttcgtattttataggtgaggaattgggaactatagaagacgtatatgaaccatacttacttcaaaaaggttttataataagaacaccaagaggaagaatagcaagtgataaggcatatgaacatcttggaagagtaaacaattcaaaaagcaaaagtaataatgggaaagtacaaggtagcttttttgataaatagataaatagggatttattagtaagcactttaaaattgagttttgaacaaccgatatagtttttaaaagtttaacttcgttagaagtgtcaataataagaataagctgttagttaggagaagataaataaatgaacgtaaaagattttgatttttatttaccagaagagttgatagctcaacatccgttggaacaaagagattcatcaagacttatggttttagataagaaaactggtgagattaagcataagaaatttcatgatattatagaatacttaaatgaaggagatactttagtattaaacaatacaagagtaatgccagcaagattaattggagaaaaggaaggtactggcggaaaaattgagttccttttacttaaaagaattgaaaaggatagatgggagtgcctggcaaagcctggtaaatcggcgaaagttggtagaaaattcacatttggggaaggtaagttaaaagctgaagttgttgaagtggaagaaaacggaaatagaatagttgaatttttctatgatggaatatttgaggaagttctagattcacttggggagatgcctttgccaccatatattcatgagagattagaagatagggaaaggtatcaaacagtgtattctaaagaaaatggttctgctgcagcacctactgcgggattacattttacaaaagagttattgcaagaaataaagaataaaggaattaacatagtatatctaacattacatgttggacttggaacttttagacctgtaaaagttgaatctctagaggagcatgaaatgcattcagagttttatatgctttcaaaagaaagtgcagatataataaacgaaactaaaaaaagaggaaatgcggttatatctgttggaacaacttcaacaaggacattagaaactattggtgatgaaaatggatttgttaaggaacaaagtggatggactaatatatttatttatcctggatataaatttaaagtagtggataagttaattacaaacttccatttaccagaatctacattgataatgcttgtttcaactttagcaggaagagaaaatgttatgaatgcatatgaagaagcagtaaatgaaaaatatagatttttctcatttggagatgctatgtttattaaataaaagttttgattacattgatgaggtgacatagtcaagtgtttcaatataaaatgggatgaattagaaaatagatattgattttataattcagctaacaactaaatggaagttagtttctttaaagaatctcagagttgctcagtaaacaaatgtagctgagtttcgtaaaaatataattaagaggtgaacgcttgtgagtaaaaggtatactttattaaaaaaggatggaaaagcaaggagagggcagtttgaaactcctcatggaactatacaaactccagtattcatgaatgttggaacattagcagctataaaaggtgcagtttctagcatggatttaaaggagatagggtgccaggttgaactttctaatacatatcatcttcacttaagaccaagtgataaagtggttaaaaaacttggaggattacataagtttatgaattgggatagaccaattcttacagattcaggtgggtttcaagtattttcgttagctaagatgagaaaaataaaagaagaaggcgtgtattttaattcacatatagatggaaagaaaatatttatggggccagaagaatcaatgcaaattcaaagtaatttggcatctacaatagcaatggcttttgatgaatgtattgaaaatccagcacctagagaatacgtggaaagatcagtagaaagaactacaagatggcttgaaagatgtaagaatgaaatggatagattaaattctatgccagatacaataaataaggaacaaatgctatttggaataaatcagggtggagtttatgaagatataaggataaagcacgctaaagaaataactaagatggatctagatggatatgccataggtgggcttgctgttggagaaactcatgaagaaatgtatagagtgatagatgcagttgtaccacatttgccagaagataaacctatatatttaatgggagtaggtacacctagcaatatattggaagcggtcgacagaggcgtggatttctttgattgtgtacttccagccagaaatgggagacacggaaatgtattttgtagtgaaggcaagcttaatcttatgaatgcaaaatatgagcttgatgatagacctattgatgatggttgcgaatgtccaacgtgcaagaattatacaagagcatatataagacatttatttaaagcaaaggaaatgcttgcgatgagattatgtgttttacataatttgtacttttataataagttaatgaaagatataagagacgcaattgaaggtggttatttcaagcaatttaaggaagaaaaattatcacaatgggaaggaagataattgaaaataattatttatgaatttggtgggatatagatctttacacaatttctaaatgaacatgagtaacaaatgtaggtttatattgacattaaagtaaataaaatgtaaactacatatcatgaatagaaaaaaataataaacacattggaggaaaagtatggataatatgttagcgttacttacgagcgtagtaccttatttacttgtatttgtgatattttttttccttcttatattacctgagaagaagagaaaaaagaaatatcaaggtatgattgatgaattaaaagtaaatgatgaaattgtgacaagaggtggaatcataggtaagattacacatatggatgaaaaatcagttacaattgaaagtggtcctgcaaaaactagaattaaattagagaagagcggaatatctcataaaataaagatggattaatcataatgccctttaatatttcataaaatgaagtgttggggggtgtttttgatggaaaatagtaaatattttagatcagtagtaaaaggtactattggaactttgattctaagcttcataggagttacaattctatctttattgatgactaaactagtatttagtaaaggtatttttaacatgatatatgtaataatatctttatgcagtttaagtttaggagcaatgataggagcaaagaaaaatgaatcaaagggatggcttgtaggctttggagtagcactatcatattatttagtattgtttatactatctagtagttttaatggagaattagcatttaagctttttgatttcattaaattgattatagcactggttgtaggtactcttgctgggatgctagggataaatttataagatacttcagtttttaatgactaactttacaaagattaaaagaagttatacatatgtgaaatcatttttatttaaatgaaggttaaacagtattttaatgttatattatacattaataaaaaactttattaagaaattatagtgtgctataatgaacaatgtgcaacataagaatgtaataatatttaaaattaagaagtaataagttctttaaaattcagcttaaagactttaatttcttaattttaaatattaaagtattttacataataaaggaaactgttaatgaaattgtaatccaaaattttcagtaaggaatatatagtaaatactaacctaatgaaagacataatatgcagagggggattaagatgaaaagaaaaagcaaaagttcagcattgttgatattaattattgctgtaattggactgttagcttttgcaggatttaaaggatttgttctaggaggatgggaatttaaatcatttgataaagtaataactagaggactagatttacaaggcggagtttctgttcttatggaaattcaaaaagatgatgtaactgcagaagaattacaaagtgctaaggaacatttatctttaagagtaaataaacttggtgttgcagaaacaattgtagcaacagaaggtccaaagagaataagagtagatgtaccgggattaactaattctaaggaaatagtagatagtttggttaagtctggtaatttgagttttaaagggccagatggaactgaaattttaacaggttcagatgtaaaaaaagcaactgcacaaatgaatcaacaaaatggtggatatgaagttggtttagaattaaatgatgaaggtgcacaaaagtttgcagatgcaacaggaaaatatattgggcaaaatatttcaatctaccttgatgacgaagaaatatcaactgcgcgagtaaattcgcaaatttcaggtggaaaagcaagtattgaaacacatgatacattagaaaagaataaagaattagctggaatgattaatgcaggtgcacttccacttccagttaaagaagtttcagttagtaatgttggagcggaactaggagctacagcatttccaaactctgttaaggcgggaattataggagttggattagtatttttattcatgctattccattatagaattcaaggattaatggctaatattgctttaactttgtatataacacttacactttttgcttttatagaagtaggtgttacattgactcttccaggtatagcagcattcttgcttactattggtgtggctgttgatgctaatatactaacgtttgaaagaactaaagaggagttaaagaaagggtatactgttaaggcggcagtgaaaaaaggatcagagcatgcattatcttcaatagtagattctaacatgacaactttacttgcatcactaattctatattttataggatctggagcagtaaaaggttttgcaattacacttatgataggtatagttataagtttatttacaggtttggtagtaacaaaagtacttgttaatttagctgttgaaagtggaattataaataaaccatcacactttggtgttactttgaaaaagggggatgaaaaacatgcttaaaataatggaaaagacaaaattatggttttcaatatccctaatcattattgtaatcggaatgggattcttatgtgttagaggactaaactttggtatagattttaaaggtggttctgaaatagtacttcaactagacgaaagtataaataaagatgatgttgacacaatcattcgaagttatgcaccagatgcttcgacgaatacaattaataataatcaatatgaaataaaatcagcagatctggatagtgataagttaggattaattgtatctgatttagaatctaaatataaactggatgataaagtgctagtttcacaaaatgaaataggatcatcagtaggtagagagttgactcaaaattctatatatgcattacttgcggcttttgcagtaatgttagtgtatatagctattagatttgaattcaaatttggagtagcggctatagcggccacaattcatgatatattagtaactatttctgtttactcaatattttatattccagtaaatacaccttttatagcagcgatactgactatagttggatattctatgtgtgatacgatagttatttttgatagaattagagaaaacacaaagataatgagaagagcgaaatcaattgaagtggcagatgtaagtttgactgaaactatagcaagatcattatatacttcttcagcaacagtagttactataatagcaatgaattttttagtgccatctgttcaagcatttacgattcctttaattgtaggtatcataagtggagcgtattcatcaatatgtatagcatcaccaatttgggtatacttaaaagatagagttagaagccaaaagaaaaaattacaaaaagcttaattactggaaatgaagaaacctccagcacaatgggggttttttcatttgttaacaaaataattgtaaaatttattataatcatttataataaaggtgttttctaattttatggaggaataaaccatgcgtaaattctgggaaagtatatattgtccaaattatattagtggatataacccatttatacttaagggtatgaacaaagcaatagagagattagctttggcggtaaataatagacaaaaaatagttgtttatggtacatataatgtcgatgggatttgtgcagtttcatcgttaattcttgttttaagatatttaaatgctgatgtagaatatttaatatatgataggcaagaagctgatgctagaataaattcggtagatataaaaaataacgtagattttttaggtgctgaactattaataactttaggtgttggattaaaatctaaagaagaagttgagctatgcaaaaaactaggtattgatttaattattcttgaaaatgaagaaagtgatcttgttaatgactatatttacataaatcctaaccaaaaggggtgccaatacagatataagaacttatcgacaagtggacttacttttaaacttatgcaagctattgctatatattataatatgaaaagtataaataaatatttagatttaatacttataggtattcagtgggcaaaggtaccatcaaaaggagaaaatggagtactaattaaagaaggaaataagttcctgatgaatactaataataatggattgagatcaataatagaatttaacagtttggaagagtttaataatgatggtataaataatataattgaattcataattccgcctataggtgcggtaggtgttatggataatgctagaattgtattggagctcttaactacaaatgataaagatagagctgatcaaattgttaaatatttatatagacttaaaacaaataattctataaggtatatggaaagttaatgaaatagtaaagcaatatttattaattagtagttgtttaatattgaatcataaatgatatgttaaattaaattctatggaggagttaaaatggatttacaagaaaaaataagggtaatcgaaaattttcctaaagaaggaattagttttaaggacataacaacattaattgctgatggagaagcgctaagagaaactattaatagaatagttaaacatctagaggataaaaaaattgatttgattgttgggcctgaagcaagaggatttatttttggagttcctgtggcatatgctttaggagtaggatttattccagtaagaaagccaggaaaattaccaggagaaactatatcagttaattatggattggaatatggagaggatcagcttcaacttcataaagatgcaatcaaaccaggtcaaagagttgctgttgtagatgacttattagcaacaggggggactgtagaaggcgttgctaaattaatagaacaagcaggtggaatagttgcttcacttgattttgtaatagaactaactgaattaaaaggaaaagataaattagaaggatatgatgtactatcattagttaaatacgacatctaagttgtgattttaggtattttaagagttgtttctgggcattataattggtaaggattccatttcttttaaatgtattgttgaaaataattctaaaataatatataattattaaaaagttaggctggttattaaaccagcctttgaatttaggtatattcaaaaaagcggagcggaattcaggatactttattaatttaattgtattttatgctgataaattgactaacgctaagaatcagtatttactaaattatctgcctaaaaattatactgtaatttctaatctgttattttgttttagatacttacttcaaatgaattaatatagaaggagcgtaatccttatgattgataaattactggaaaagattgataagaattgtaataatgttgatgttgaaatggtaaaaaaagcatatgattttgctgaaaaagctcataaggaccaaaaaagggaatctggtgaaccgtatattattcatccgatagcagtagctgaaattctagctgagttgggtatggatactaatactattgtagctggattattgcatgatgtaattgaagatacggagttttcttatgatgaaacagttagcctttttaatgcggaaatcgctaatcttgtagaaggtgttacgaagcttactaagcttggagaaatggaatataaaactaaagaagagcaacaagctgataatgtgagaaaaatgttgcttgctatggcaaaagatataagagtaataattattaaattggcagatagattacataatatgagaactctaaaatttatgccagcaaaaaagcaaaaaaataaagcaaaagagacattggatatttacgcgcctttagcgcataggcttggtatgtctaaaattaaatgggaattagaggatttatgttttagatatttacatgaaaaagaatattatgaattagtagatagtattgcggaaaagagagtagaaagagaaacttacataaacgacatagtaaatgatttaaaacaaaagcttggaaattctggaattgaatcagatattgatggaagaccaaagcatttttatagtatctataaaaagatggttagtaagaataaaagcatagagcaaatttttgatttaacggctattagagttttggtgcattctgttaaggattgctatggtgtccttggaatagtgcacactatctacagaccaattccaggaaggtttaaagattatatagcaatgcctaaaccaaacatgtatcaatcattacataccactgtaattggaccacaaggtaaaacttttgaaattcaaattagaacttttgaaatgcataaaacagcagaatatggaattgcagctcactggaaatataaagagggagataatgccaaaggagagcaagataagcaaaaggattttgaaaagaagctagtatggcttagagatatgttggaatggcagaaggaaacatcagatgctgaggagtttattgaaggttttaagatagatttgttttcagatgaagtatttgtatttactccaaaaggtgttgtaataaatttatgcagcaatgctacgcctatagactttgcatatagaatacatactgatgtaggaaataagtgcgtaggtgctaaggttaatggtaaaatagttcctttagattatactctcaagacaggagaaattgtagaaattttaacttcgcctaatgctaagggacctaatatggattggttaaacatcgcaaaaagtaatcaatctaagagcaaaataaaactttggtttaaaaaggctaaaagagaagaaaatatgctaaagggcaaggaacttcttgaaaaggaattaaagaaacagtgtgttaactatgctgacgttgctaaaggggatttttatgaaaaattagtgaagagatataatattcattctatggatgatttatatgctttaattggtataggaggattctctgtatctactcttattgcaagattgaaggaagacaatgggataggcgtagataaggtaaacaaggaaaaagaaaataaggaaattttaaataagaatatcgaggaacaaattgcaaaaacagcaagaaaaccagaacccaatggatatggaataacagtaaaaggtgaaagtaatcttatggtcaggtttgctaagtgttgtagtccagttcctggagatgaaattttaggatatataactaaaggtagaggagtatcagttcataggagtgattgcagtaatttgcaaaaccttatagatacagataaagatagagtagtagaagttaattggggatcagcacaaggtacatcttattttgcagaaattcaagttgtagctgatgatagagatggattgctagcagatataatgagtgttataacagagcttaaactacagttaagtgctgtaaatgcgaatttagcaaagcaaggatcggcactaattaatgtaaaaataaaaattacatctgtcgatagtctgaaggatttaatgaagcgacttaaaagattaaaaggtgtgacagatgtatatagagtaaatagttagaatcttatatatatcagaaaggtgagataacatgagagcagttgtacaaagagtgagctcatctagcgtttgtgttgatggagatataattggtgaaataggtgtaggctttaatgtattaataggaatatctaaggatgatacttttgaagacctaaaatatataaaagataagattatcaatttgagagtgtttcatgatgaaaatgataaaatgaatttgtcactattggatattaaaggtgaaatacttgtgatatctcagtttacattgtatggtgattgtagaaaaggaaggaggcccaattttatggaagcacaaggtggagaagaggctaaaaagctgtatgaagaattcttagatcttcttaagacatcaaacttaaaagttgaatgtggagaatttggagcagacatgaaggttaaaattaataatgatgggcctgttaccatattattagatagtaagagaaatttttaggaggagttcaaattgattataaaaacattaatagcgggaatgtatgaagaaaattgttatttaataatggatgaaggcaccaaggaacttgcaattatagatccaggcgggcagccgaatttgatagaaaaagagattagtaggttggatggaaagcctaaatttattcttttgacacatggacatatggatcatgtgggagcagttattgaattaatgaataaactcaatattcctttttatataagtgaaaatgaagaacaatatatgaaaaatgacgagtttgtatttggatcactgccaaaagcttcaaaatatttaaaagaaggagatacagtatctttaggcaataatataattaaagttatagagacagctgggcatacagcaggtggtatatgcttcctagtaaatgatgaactgtttacaggagatactcttttccaaggatctattggaagaagtgattttccaggagggaatggagcacagcttataaaaaatataaaggaaaagttattgcctttaggagatggtgttaaagtttatccgggacacggaccagcatctacaataggatatgaaaaaaggaataatccatttttataaaaataaaaatgtgcattaatttgcacatttttaaggggagaaacgatggaagttaaagttagtttaaatgattttaaatttagatacgaagtataccaattatttaatgtatattactcaatgagggaaattaaatttgtgggtgcagaagatgcagattatatggtttatattgatgagaaaaccttaaggtttgaatataataattattatgtagaagaatctttaggagaagatattaaaaattctcttagaagatttctttttctgtgccttagaaatgtaactcatgacatttatccttggggaatattaattggaatcagaccatctaaaatagcattaaaattgcttgaagaaggcaatactgaagatgaagtgatagaaatatttaaagaaaaatacttggctcatgaggataaagctagactttgtatagatgtggcaaaagctgagaaaaaaatagttaataaggataaaaatactatagctatatatataggcatggcattttgtccaacaaaatgtttatattgctcatttacttcgaaccctataggtgtttataaaaagatggtgacgccatatatagaggcacttattaaagagataaaaggtatgagttcatatgtgaaggaaagaaaacttaatatcgaatcagtatattttggtggcggtactccaacatcagtaagtgatgaagagttcaacataatcatgaaagaaatttataattgttttattaaggatgataatataaaagagtttacggttgaatgcggaagaccagatacgcttactagaaataaacttcagacaatgaaagagtatggagtagatagaataagtattaatccccaaacaatgaatgataaaactttaaatttaattggtagaactcattcttcagcagatataaaagaaaaatttaaaatggctagagaacttggatttgatgatattaatatggatataataataggacttccaggtgagacgcatgaagatgtcattcatactaagaatgagttaataaaactaaaacctgatagcattacagttcatggcctagcgcttaaaagagggtctagaatgtatgaagaatttatcttgaaaaaaggaatacaaattacgtcccaagatgaaattataaaaatgtatgaagaaagtaggaatctggcagaaaatttaggtatttcaccatattatatgtataggcaaaaaaatatggttggaaatatggagaatttaggttatgctaaagaaggcaaagaatgtatatacaatattcaaatgattgaggaaaaacaaacagtaattgcactgggagcagcagctgtaagtaaagtgatatttttagaggaagatagacttgaaagatttccaaacttaaaagatcttcatgaatatgtatctagaattgatgaaatgattgagaaaaagaaagcgttgcttgatacattgtatacataattaactgtaataaattagaatattgtaaatttgtttagtcaaataggaggaaaagatcaatggcgattgaaatgcaagcaccaaaaggcaccaaggatatgttgcctgaagatgcctataagtggcattatatagaaagtgcctttagaaaggttgctaaaacatatggaattagagaaattagaactccgatgttcgaacacacagaattatttttaagaagtgttggggatacaacagatatagttcagaaagaaatgtatactttcaatgacaagggaaatagaagtataacattgaaaccagaaggaactgcatcagcagtaagggcatttgtggaaaatagattatttaacgaagctcagccaacaaaattatactatattacaccagcgtttagatatgaaaatgtccaaaaaggaaggcttagacaatttcatcaatgtggattagaagtgtttggctcaaatgcagcttcaatggatgcggaagttatagcagtcgctatggatacattaaaagaattaggattaaaaagtttaagtttaaatataaataatttaggttgcccaagttgtagacctaaatataatgaagcgcttaagaaatttttagctgataattatgatggactttgtgatacttgtaaagatagatttgaaaaaaatcctatgagaatattggattgtaaagagaagaaatgtcatgaaattactaaaaatgcgccgataatattggattatgtttgtgaagagtgtagtacacattttaataaagtcaaagaatatttagatatcttaggacttccttatacaatagatccaggcatcgtaaggggattagactattacacaaaaactatatttgaaatcttaacttctgattttactgtatgtggaggaggaaggtatgataagcttatagaagaacttggtggaccagatatgccagcagttggatttggtatgggtgttgaaagattaattatgactttagaaaaagaaaatatagaaatacctaaagaaaaattatttgatttatatattggtgctagaggagaagcggaaagtaagtatgcttttaagctggctagtgatttaagggctttaggtgtgaagtgtgagataaatcacatgggtagaagcgtgaaagctgaaatgaagtatgcaaacaaattaggagcagcatttactactattttaggtgaagatgaattaacaaatagaaaagttaatttgaaaagaatgagcgatggtgagatttttgaagtttcattagaagacttgatggaaatagctaaaatagttaaataagaataagttaaactaagggaggattttagtaatgggtgaatctttaaatggattaaaacgtacaatgatgtgcggtgaacctagagaagaacatgtaggtaaaaaaataacattaatgggatgggttcaaagaaacagaaagcttggagcacttgaatttgttgatttaagagataagacaggtataatgcaagttgtatttggtgaggaaattaatgcagaagcttttgaaaaggcaaaaggagtaagatctgaatactgcgtagcagtaacaggggaagttgttaaaagagaaagcgttaatgaaaacatgccaactggttttgttgaattaaaatgtgaaaatataaagatactttcagaatcagaaactccaccaatatatataaaagaagatttagacgctgcagaaaatatcagattaaaatatagatatttagacttaagaagatctgatatgcacaaaatatttgaaattagaagtaaaactacaaaagctatacgtgattatttagaagaaaataacttcttagatgtagaaactcctattttatcaaagagttctccagagggagctagagattacttagtaccttcaagaaattatcctggaatgttctatgcgcttccacagtcaccacaaatatttaagcagttattaatggtatctggatttgatagatattatcaaatagctaaatgctttagagatgaagacctaagagcgaatagacaaccagaatttactcaagttgatatggaattaagttttgtagaacaagaagatataatggcagtaaacgaagggttaattgctcatgtatttaaaaaagtagcaggtgtagatgttcagcttccaataaaaagaatgacatttaaagatgctatggaaaaatacggatctgataaaccagatttaagatttgggatggaaataactaatataacagaagatgttaaggatttagattttgttgtatttaaatcagcgatagaagctggtggatctgttagagctttatgtttaaaatgtggagcagaccttggaagaaagcctttagataaattaggggagtttgttaagacttacaaggctaaaggtcttgcttggattcaaattaaagaagatggtgttaaatcatcaatagctaagttcttaactgatgatgtaacaaattctatagtaaaaactatgaatgctgaaactggagatgctatacttatagtagcagataaaaattcagtggtattccaaagtttaggtgcgttaagattagaacttgctaagcaatttgatttgattaaggataagaatgaatttaatttcacatggattactgaattcccactatttgaatatagtgaagaagaagaaagatataaagcttgtcatcatccatttactgcaccaatggatgaggatttagattttatcgaatcagatccaggaaatgtacgttctaaggcttatgacttagtattaaatggtgaagaactaggtggaggttctataagaattcatgatacagctcttcaagaaagaatgtttagagcacttggactaacagatgaagtagtgaatgaaagatttggatacctattacaagcatttaaatttgggccaccaccacatggcggtttagcatttggtcttgatagaatgattatgttcttagcaggaacagaaaatatcaaagatgttattgcattccctaagaaccaaaatgcatattgttacttaagtgaagcaccaaatatagttgatgaaaagcaattaactgaacttggtatagcaatactaccaaaagaagaaaaaaatgataaagaatagaattaattaattataaaagactcttatacgaatgaaagtataagagtttttatttaagtttatattattatataggattaatttatatagataagacttttaattgtcttgtgtcaatttacaaatagttattattagaagagtattggagcattggtatttaggatatcaataagcctcctgcttaatagtggttcttcaactgcattatcgcaggcgaatttaagagcctctaagctcatagaaatatcctcttctatgaattcttttgattcccatgatatagagtcctttacaaaattaaatatgtcacatgggtcatcaaaaatttctataaatagcctttggttaggaatgttattccaagtcgcattaaactttttagaaaaagacttcaatttttggtttaatgattcagaatcacagtcccaaaaattattcaaaaaatcatatgaatttttcattgaatttaaagaagttaaatccatatttgaatcattgtattttaaagtctcattaataacagtatcaaaatctgatattggaatgagaaaaccatcagatttacggtcaaaccaagtaaaaaaagatgttggcaagaatacatgttgcaaaaatcctaatagactatagccgcaaggataagcagcccaaccgcattggagaatgtttttttcaagatcaaaaattccagtgtaaattacttttgaggtgttagttatctctttgttatcaaaataaccctcccataaattttcttcatttagaattttttcttcccaaaaagaaaagcttctataaggtcttttttcaagagtattttgttttatattaaattccaatgataaattcctcctctcgatgttatcataatatttaaaaaaatacattttaaatttatgattaattatgttagagtttagaatagaattctacaattaatgaatcattgatttcaataggaacttcttctcttaaagggtatcttataagagttcctgaaaaattatcttgatccttggctagatacggataggtattaagagtatttgataaaaaagtatccctaaacaagtcattatttctggatttttcttttaaagaaattatatcacctatatttacttcataagaaggaatatctacctttttatcattaactaaaatatgcccatgaactaccattgttgcctctcttcatagctttgggatgtccactaacatttaatcccaagcgcctacacaacttgaatttaggttctctcattcttgccataattatcatctcctataaggtcttactttgataaaagttaacctaaaataatacaataaatataatatacgaatgaaaattatcttaatgttttctattccaatggaataatattatttagaaatctatattaatgatttcataaattagtttgtacaagataatttatttgacacgttgtattttttggtaattgagtttaattagctaaattcatgaaattaaattccttatttataaatcgcaaagtaggggtaataagtcatatatgttataattaatcggaaaataaaataataaaaaagttgggggaagaaaaatgttaggaacaatagttaattcgttagcaataataggtgggtgcttaatagggttaatagtaaaaggtagattaactgagaagattagtagcacaataatgaatggtttagccttatgtgtattatacataggtatatctggtgctctcaagggaaaagatacattgcaaataataatctgtattgcactaggtgctcttataggagaaattatagatattgatagaagattaaatgatttgggaaatatgattgagagaaaaataaatggaaaaaggaaaaataattctaacgataaaatatccatatcagaaggatttgttacatctagcttattattttgtgttggagcaatggcagtggtggggtctcttgaaagtggattacaaggaaataactcaactctttttgctaaatcaatactagatggagtgtcatcaataatatttgcatcatctcttgggggaggtgtaatgttatcatcaatcgcaatttttatatatcaaggaagtataactttgcttgcaggaggactttcaacaatactcactgataatgtaatttctaatatgtcagcagtaggaagtctgttaatcgtaggacttggttttaatatgcttgggataagtaaaattaaagttgcaaatttgttgccgggaatatttttaccaattatatttggattttttttaaaataagttgactggattttaatataatataatattgttacaatttctgattggaggatttagaatgaagatatctgaactaaagagaaagtcgaaaaaacaattaaaaggaaaatggggaatagcaataacaactttatttgtaagtttaataataataagtggattttacgttgcgatgaagttgcttcaaccagatggaggtcttcttactgctattggtgaatgtattagtgttttcttaggtggaatggctacgttaggaacatgcaaatttgtattaaatttggcattcagtaataatgaggaaaagtttaatgatttatttgtaggcattaatatttactttaagaccttaggattatggatattgattaatttaactgtatctattgcaacaatgtttttgataatccctggtattatagtctcgcttatgttttcacaagcgttcttcatattatgtgaagataacaataagtctataatagaatgtttaaagcagagtctatcaattatgaggggatataagattcacttgttactccttgagttaagttttgttgggtggtggattatgtcaattctgacttttggaataggagtcttatggatatatccatatcaacaagtaactcgtgccaatttttatttagagataaaaaagtaattttcttatttaaattgcagctacataacataataaaatatttttttattgagaaaacattttcggatagtggaattataagtaataattttttattctttaggaatttatattccagtaaaatctgtggataaattaaaaaaggttcattggaaagtttgggtatttttaaaagaataaaaaagaaatcttattcgcctgccaaatttttctcacatgcgttcgaaaaggcagatgcgtgaaaaaaatattagataaaaaaatatagccaaaaattaatataagaattataataaatacgtatactattatttataatagtcgtaacttaaggggggcgcagaatgaaaaaagtaaaaatagcactactaggattggggaatgttggtcgtggtgtttggatgattttaaactctaacaaagaagaaattatgaaaagatgtggatatgaagtagaaatagcaaaagttcttgttagagataaaaataaaccaagaggtattgaaatatcggacgaacttgtaacaactgattttaatgaaatattaaaagatagtagcattaaaattgtcgttgaagtcatgggaggaatggaacccgctagagagtatatgctaagatgcatggaaaacaaaaagcatatagtaactgcaaataaaatgttattagcaactggtggagatgaactttttgaaaaagctgatgaaaacggaattatgtttagttatgaggctagtgtagctggggggattccaattataaagggaatagatgaaagcttaactgcaaataaaatagaaactctttatggaatagtaaatggaacaactaattacatcttaagtaagatggaacttgaaggtgctgatttcgatgacgtattaaaggaagcacaagaaaaaggatatgctgaagctgatcctacatcagatattgaagggtatgatgcacaatataaattagcaatacttgcttcattagcttttgggtccaagatagatgtgaaaaatgtatatagagaaggaattacaaaaattgaagctgttgatatgaaatatgctaaggaatttaaaatgggaattaaattacttgctatagcaaaagaaactaatggcaaagttgaacttagagttcatcctacaatgattccgaagaaacacccgctttcgaatgtttatgattcatacaatgctgtatttataagaggaaatgcagtaggagatttaatgttttacggaagaggagcaggagatcttccaactggcagtgcggtagtgagtgatattgtttctattgtaagaaataatgttgaaacagaaaatccgaatccagtagtaaagaataacctatgggaaagagaaattttagacatgggttcagttgaaagtaaattttatataagagcaactgttttggatgaatcaggggttcttggagaaattactgcaatacttggaaaacataatgtaagtataaggtctgtgatacaaaaaggtgacgaagaagatggtcaggtaactattgtattagttactcacagaactagtgaggctcaaattgatggtgcggttgaagaaattactagcttaaaatctgtttacaaaatagataacataataagaatagaggattttaaataaattatagcctgaacatacagcttcgtttgttggaaaaatagataatattctagtaaagattaatgttaatgccacttattaaatgtaataagtggcattttttttaattaaaagttttttgaaaaatcttaaaaaatatgatacgaaaattaagtaaaatatagaaaaaatatgttataattactttatatttgaaaaattggacaatatatgagccgatttgaataatagattatttatttagtggaaagaaaggggtggtcatttttgcccggaaaaataaaaaagatgattgacgaaatcattcaacaaagatcaaaagggaatcctgctattacggaaatgactatagctaaattaattctaaaaggaattaatcccaataaatttgatataaattctccagatgatatgacaataattaataaacttcttgatattgctaggcaattaaatgtaaataatttagataatattgaaaaaagtataagatcatcatcctcaagtaaaataacggaggaggatgcagtaaaggatataaaaaatcaattaaatattaacgacataaaattagtaatattttttgcatcttctaattataatcaacaaaagataagtttacttatggaagaagaatttaagggatgcattgttatagggtgctctacggcaggagaacttgcaagcggagaaatgttggataattccattgttgcaatggctattaactctaatatcatttctgatataaaagttgaattggttgaaaatataaagaaaaatttaaatttagagcttgcttttacttcttttgaagaatactataaagaaagtttatataatatgagctcagaaaaatttgttggtataacattaatagatggattaagcatgaaagaggaaaaaataatggatctgataggtgataggactaatgtgttctttgttggcggttcagctgcggataataatgagtttgtagagacctatgtttctgtaaatggatatacttctacagattcagtagctttaattttaataaggataagcgatgatgctgagtttagtgttataaaaacacaaagttttgaatctttggactatagcttcgttgcaaataaagtggacgaagagaaaagacaagtaattgaatttaataatagaccagctgcgcttgaatatgcagatgctgtgaaagctgataatattgaagaaatttcaaaatattttatgagtaacccgctaggattgatgattgaagataatgatttttttataagatcacctcagagagttatagggacaagtatgatgttttattgtaatatacttgaaggaatggaggttaaacttttaaaagctacaaatattattgatgatacaagaaggacaattgaaaataaagccagtgaattaggaaaaattgatgggattataaattttcaatgtatacatagaacgttggaattaaaaaagaaaaatttgtcagatgaatatgctaaaatatttaaagatattcctactataggattttcagcttatggagaacagtatataggtcatataaatgacacatctacaatgctaatttttaatttaaagtcaggaaaataaactgagaaaaagataggaaatttaaatatatactttttatggaatattacaatgttttgaagagaggctataagtaatgaagaatttagaaaactttttttataaagctaatattcttattgttcatgaatactttgaagattcacgggtgttaataaaatttcttaattatagaggatatgtaaatataaaaagtgtgaaaaaaagtgaatcaattgtaaagtcaataaaggaaaatataccagatataattctaataaatgtaaatttggaatccgttaatgggtatcaattatgtgaaattatgagaaaagaagaggatttaagagatgttccaattatttttataaacacatgtggagaagcaattgatagaaataaaatatatattgttggaggaaatgattatttaagcaccccacttgaatatgaggaagtcataaatagaattgaaatgcatttaagaattaagtttatggagcataagataaaatttcataaaggcaattatgatacaatatctactcaattagagagttggaataggattttattaaaaagaaatagtgatttagttaatgaagttattgaaaaagacaatcaattatatgatataacatttgagttaaaagaattcaatattatattggaagaagaaatgaatgaaagaactagaacagaggaagcgttaaaggaaagtgagagacaattacggcattctatagaagaggcaccagtgccaataatgttatataccgaagatggatttgtaaagaagatcaatagatcatggagtgatattaccggatatagacttgaagatattccaatgatttcagaatgggcagatatttcagaggcttttaaagaggaattgagcagtacaaatataaaaaaattatttaattcagagaaaaggcaaaacaatggggagttttctataaggacacatgatggaagtataagaatttgcaatttttattcagcatatattggggatttagaggatggacataaattattcatgaaagtagccatagatgtgacagagaaaaagcgtatggaagaattgcaaaaaagtgttgaagaagagaggaaaaaattatatgaaattaaggaatacgacagaataagaacagaatttttttctaatatatctcatgaattaagaacaccgattagtgttattttctcggcgctgcaaatacatgaacttaggttaaaagattgtatatttgaaaatagaagtattgataaatataaatatactaaaataatgaaacagaattgttatcgtattttacgacttattaataatattatagatataacaaaaattgattctgggtattttaatatcaatgaacataatattgatattatcgctcttatagagaatataactttatcagtggctgactatattgagaataagggactgtctcttatatttgatacgaacgtggaagaaaaaattatgtcatgtgatccggaaaaaattgaaagaattattttgaatatactatcaaatgcagtaaaatttacttcaagtggtggaaaaataactgttagtattgaagattgctatgataaaatttgtataaaaattaaagatacaggaagaggtattccgcaagataaattaaattcgatatttgaaagatttatacaggtagataaatctctagctagagatcatgaaggaagtggaataggactttctcttgtaaagtccttagttgaactgcatggtggagtaatatctgtaaaaagtaaaataaattatggcactgaatttgttatatatatcccatgcaaactagtaaaaaatgcagaagagcaatattcgctttgcagctctataggcggagattgtattgaaaaaattaatatagaattttcagatatctataattaaaattatagattttaattatattgcaaaaataatccttcatcgtaattctaaaaatattacaagaattttaacagtaattataaattatacattgtgaagtatgaattgcaacatgtatatgcttgtaaaatatttcttttataatgtaagtatatgtgaaaaaaagttaagataatatagtaaaaagatatttttacttactttttttaagagttttaaacaaatgttgaatataaatttaatatttgttactatattagtgtatttaataggttagagataatgaggtttcaaacaattgatgggactttatttatctctttttgattgttataggaagtgaaaaatgagaatttaaactatttgcccccaaaaggaatgtttctagagtgcgaggaataatttgctattgcatatatctaagtattcaagtaatatagtttccacactttatatgctatgttattagaaatattaccttttaataatatatgaacctctgtatttatatagcttcataaatacagaggctttttaattccattctttgtgttataatttaagcaaaagaaataaaatacagtgtggaggaaaaggatgggtaataatagagatttaattagatattcaaagatattattaagcgcatacttaattataggactaatcttaatttttagtagttctatggttttagatttaagtcttaatattttaataataacaggaatatttgtggcgtgtacactggtatatggagtattaattagaaataaaaaatatatatctacggcaattattgttgccttgttatatgttggtgcaattatcatatatagtcctttaattagttataatgctcataggaatttaataggaaatatagaagaaatggatttttctagccaaatagaatatattgatataaaccagttgcctattattgataaagaacttgcatacaagctagctgataagaaattaggtgaaattactagtcttgggagtcaagtgagtgttggtcaattgacattacaaagtgtaaatggtcaactgtgttatgttggaccacttgagcattcttcttttcttaaatggattagcaatagagaaggaacgatagggtatattaaggtaagtgctacaaatcaaaatgatgtagagttggttacccagcttgatggaaaagatattaggcttaaatatttaaattctgcatattttcttagtgatttaaatagagcagcttactttagagatatgaaagcagggcacacagattatacttttgaattagatgacagcggcagaccatattgggtcattacaagatatgatactggcgtgggcattacagaagaaaaggccataggtgcattagtgatggatgctcagacaggtgaatcaactatttataatattgataatctaccagaatgggtagacagaatacagccgatgaaatatattaataggtatattaacaaatggggagaattggttcatggtgttttgaattttacggataaagataaacttaagacaacaacagatggtatgaatattatatacgataagggtgtctgctactattatacaggtataacgtcagtaggaagtgatgaatcacttgtaggatttatgcttacaaatacaagaaccggagaaactaaaatgtataaaacggctggtgctacagaagaagcaggcatgagatcagcagaaggaaaagtacaacagtatggttataaagctacttttccatatctgataaacatacaaaatgagccgacatattttatgacgctgaaagattctaatggattagttaagcaatatgccatggtgaatgtaaaaaattataacactgtaggagttggagatacacttcaagctactttaaataaatatttagagggattaaccaatactaatatttctctcgaaagtggaaatcaggaagaagttataagaggagaagtagagaggataggtctagttattaaagaaggtacgagtatttatgacattaaattaaaaaataatgaaaatattttctcggtttcaacagagacatctagagaggttgcattaactcaggctggtgactcagtggaaatgaagtttattaaagttggagataatagatatattataaccaattcatttagtaatctttcttttgttaacagtgaggaacagaaaaaggaataggaagaaaataattaaaattaagtattgcaattaaaagggagctatgatatactaaaatagttcccaaagggaataaaaaaatatatcaaagatttaattatattaaaatttctccttatgagaaagtattatttaactaagtctttaaatttggaggaattgaaaatggaagataaaacattagtatgtaaagattgtggaaaagaatttatattcacagttggagaacaagaattctacaaagaaaaaggattcgaaaatgatcctgtaagatgtgcagattgtagaagagctagaaagcaacaaaacaacagaagatagtttctgtttgcaaagataagctataagatattattcttatagcttttttattatatattggtataattgatacctttatggtatatataggatactattaattgacaaaccatacactaatttatatggtcattttgaactccttctcttttaactgaatgtctttttctgtttggattgtggttcatattttcttgagttataggagtttgatgattgcatttttccattctagcatgtttgttatcaggttgactatcttttggcataataaaaacctcccttaaacaataaatttacatattaattttttgctaagtgatacaatattattcgtaagctgtagaaaaaataataacaatattagttatattattaattaaatagaaaataaataaacctgctaaataatatattaattatacctatattatttagcaggtttattcaaatctattttcagtatataggttattttgtaatagttaatctaaacaaaaattaattaaggttcaaatttaaaaagcttgtagcttcaatttcactaatattttttataactgaaacttcttcaactaaaaatttgtaagcagtattaaataattgtttttcacttgaactaagtgattttttcttattcataagaattagatcgtaaactacttctgcactatctttaagtaatccagatcttattttttttgcattagcttgatatctttccttggatgatgcaagttcaaattcactacttttattttcaagagtgagcaatatatgatctaaggtagagttatcacaaacttttcttaaatttgagttagatgccttatcacttggaatcataatttctaaattatttgacgtaatctttactattatgtattccttggtatttcctgaaaaaatcttattttctattctttcaacagtgcctatgccttgcattggataaacgactttatctcctatcaaaaacaaaaaacacacctccttaaatggttgttctattattataacacattattaaaaaaaataaaacttaaatatatcatatctattatttcatgtcaataatatttgtgtttttttagaatgtaatattaattttttgataactatataacgtaaaaatttatatgacaattaaaggtaaaaagtaaattgaaaaatacatatttaaagaaattatgataagtaataataatacaaaaaataaattaaatgtaaaaaatgtaaaaaaatatagaaatataagtaaaacaacagcttgataataaataatatgtgatgtaaaattaaggaaatgattacagaaaagagggggttgctggcgtgggggttcataataaaaaagttataaaaagtgaaagaaaaataaaacggaaaaataagaatttacttgctgataagattttggcttataatcccgtgtttttggaaggaattgcagtatataaagatgcaagtagaaactttatatttttaatatttcttggagctttgttaatcgactttccgataatatcagtgccttgttgtatattgtctatgttttttattattagaatgttgcagtttattaaatataaaagcataaataatatagtaaatgaaatagcaaaggatttatcttttaaagggatatataataaaggtaaagtagaggatatgttaaatgattttaaagttaaatatggagaagatatcgttgagtatgaacaattggtaaacatgttagataaatatgaagctttagtaacaaatattgaatttgctttaaaaaatataactttcaaggataaaacaaatatagataacaaagaagaacttataatagataatagtgaaattactttctttgaaaatgataataatataaactgtgaaatatataatagggatgagcataaaaatacgagagtaaataattattatagaagttttaatgaaaaattttctgtgctttataaaaatggtgatggagagattaagagcgttaataaagcaattgagttctttgatgatagagataatgaaaacattaacgaaaatgctgttgtcctgaaaaatgttaataaagaaaataaaaatcttacagtatatttatataaaaagtcatctccactacaaaaaaatgtattgtgatgagctaacatttataataaagttagtaaaaaataaacttctattaactgtagtatatgatttgatatcgcagttataggagttgtctttttttttattttgtaataaaatctaataagtgtagtaatatgtatttattaaaattaattataagtataattatattagattacttatggaggaaaaaatgcaagatataatgataataggcatagctggaggaagcggatcaggtaaaactactttggctcaaaatataagagaagcttttagtgatgatatagtaattctttgtcatgattactattataaatctaatgagggaatttctttggaagaaagaaaaaaacttaattatgatcatcctaattcctttgatacagatctactaatagagcagcttagacaattaaaagcgggaaatacaatatatcatccggtatattcttttgttgaacatacaagattgaacgaaactgtagaagtaaaaccagctaaagttgtaatagttgaaggtatattaatatttgaaaatgaagaactttgcgatttgatggatattaaagtttttgtagatacagctggtgatgttagaataataagaagattgctaagagatgtaaaagaaagaggaagagatttagattctgtaatcaatcaatatttaggtacagtgaaacctatgcatgaggagtttgttgatccaagtaagagaagggcagacataataattccagagggtggttgtaatgcagttgctttaagcatgctactggaaagagtaaggaattttatatataaagaatagcagtacataatttttaagtaatattaaataaagtgtgtctttttaagtttgaataaatttaaaaaggcatttattaattattatagacaagttggtagtaattcataaaaaggagaagatacgtatgaaaaaggtagatgcagtaatatttgatatggatggggtattaatagattcggaaagaatatcgctcaaatgttatcaggaagttttaaaagattatcaatatgaaatggatgaaaagatttatgtaaaattcataggaagaaatgttgagggtataaaagaggcattgcaggaagagtttgggaaggactttcctttcgatgagatatataagaaaaaatctaaattagcattggaatttactgataaaaatggtgttaaaatcaagcctggagtacatgaactattagactacctaaataatgaaaattataaaatagcggtagctacttcaacaagaagacaaagggccattgaattattggaaagagcaaaaataaagggaaaagttaattatatagtttgtggagatcaagttgaaaattctaaacctgatccagaaatatttttaagagcagcagaagggctaaatgttaaaccaaataactgcttagttgttgaagattcagatgctggaataacagcagcccatgcggcgagtatggcaggagttcatgttccagatatgaagatattagatgataagacaaagaagctagcgtttaaaatatgtaaggaattggttgatgttaagagcgttttggaagaaattaaagagaattgaatttaattaagtttgagaaaggaacactaaatatgaatgaagagttaataaattcttattggggagttaatttagaaagtaaagtaataagtcaatctagtacaacgctaactgtgttgatgccaggaattggctatacattagatagacctcttttagattattcgaagaaattagctctagagttaggttatgatgttctttctttagaatatggttttcagattgcaagaaaaaacttgcttatagaaaaggagttccagcacttaataaaggaatctatatgtatctttaaatcagcattaaaagggaattacaccaagatagtattcatatctaaaagcataggaactattgtacatactctactttgtgatgagagtagtggttatgaagttaagcatatttacttaacgcctatagatgatactttaggagttggaataaaggaaaattcgttagtaataagtggaacaaatgatccgctaataaatatagaatctattgaaaaaataaaaagaattaatggtgtagagatgattgaaatagaaggagctgaccattcgctaaatataagtaatgatatattaggaagtatagatgttattcgtaaagtaattgaggctgaaaagaaatacttaatataacaaaaaacatttaaagaataaattctttaaatgttttttgttatattaagaaaattataatgttagcattaaatatcatgtttgtgaaatctatgacttcacagacaactaagatttttatggattttattgataaatcattttaggttgaataactttaggatcatatccgctatctttgagagctttaataattgcttctttgtgatcatgtccgaaggtttccattgtgatatcaagttcaactgcactgttacgattaatgcttacaaattgattgtgatcaagtttgattatattaccatgagcttcagcaattaccttagatacattggttaattctccaggtttatctggaagtaaaacagaaactgtacaaatacgttctctttctattaaaccatgttgcactagggatgcaaaggtaattacatccatattaccaccgcttataattgatacaatctttttatcttttacatctaagtgttttaaagctgctacagttaataaacctgagttttcagcaagcattttgtgattttcgagcatatctaggaacgctcctataagttcgtgatcctcgatagttatgatatcgtcgagattttgttgtatatatggaaaaatcttagaaccaggggttttaacggcagtaccatcagctattgtatctactgaaggaagagtagttacatctccattctttaaagaaacttgcatgcaatttgcgccagcaggctctacccctataactcttatattagggtttagaagttttgcaagtgtagaaacacctgtagcaagtccgccgccacctattggaactaagattatatcaacagttggtaattcttttatgatctccattgctattgagccctgaccagttgctacgtctaagtcatcaaaaggatgaataaaagtataaccttcttcttcagcaagttttaaggcgtaattgcaagcctcgtcataaacatctccgtgtaaaatgacttctgcgccataagcttttgtgcgattaactttcattagaggagtagtggttggcattacaattattgcttttgtgttgtaggctttggcagcataagccaccccttgagcatgattgccagcagaagctgtcacaagacctttgtttctatcttcctctgaaagcgtgctaatcttatagtatgcccctctgattttatacgcccccgttttttgcatattttcaggcttaaagtaaactttatttcctgtaatatctgagtaatagtcgctaaacactaacttggtttttaagattactttttgtacgatttcatatgcttcttcaaatttatcaagtgtcatcatttttgtaatatcccctttatatgtatattgcttttagctaatagttttatgataacatgttagtattttatgtcaagtaagagtttttaagacaataagttttgtgaatttaaatcaaaaggtaactctaggaataaggaatgataaaaaaataacaagttaagatgatgctgtaatactataatgaaataaatatatttatcaaaaatatatatttattagtattaaagtgttaatagcatttttaacttgttatttctgagcattattagataggaaaaaattcataatatatagttaagacatatgattttcataaagaacttttattgttaatgtcctttatgcttttcaagctttttcttttttcttaactcgaactttctttgctcttcttgctccttttgttcttttgatttttgtttgtgtacaattttgctttgttcatgctgtaattgtattgccatttgagctttagttcctatgcttttaacatcaacctcttttctaatgcttctttgaagccttttaggattaggcttctttgttgatgagttaaagtcgtcagacaatactggcgaactaaaatttagacgatagaaatttttcagtatgagctcgtagacttccacgtcttttggctctgagccgaaggtgactttgcataccttatattcgccattttcaatactttcaaagacaccaatccaaaatggatcatcaaaaagaactgttaatttaattattgttatcataattaaatcctcctgtagtatataaattcacagagaatggacaaccccaggagggcaggttactgctatattataatataggttctgactaccaacagaaacagtgtttttatctcttaaatattattatagtagaagagtatagtaatgaaaagagaggttgttattaattatatttatattatgtcttctatgacttagtagataatctagataaagcctataaaaatagaattattgataagttttatagagaaatttaggttgaaacataaaaaaatagccagttttaataaactgactacatttttttattaactgactatattattttagttgtccaatcttcgcaattccaagtttctgttattatatctctataaaattcaggttcatgcgaaactaacagaattgttcctttgtattctttaagtgctcttttcaactcatcctttgcgtcaacatctaagtgattagtaggttcgtcaagtattaatatattagtttcattatttataattttacaaagtctaacttttgcagcctcaccaccagatagaactcttatttgtgattctaattgcttagttgtaagtccacatttagcaagagcagctcttatttgatattgagtatatccagggaattcctgccataattcatctatacaagtattgctattattgcctctatcttcttgttcgaaataacctatgtattgataatctcctaaatgaacttctccgcttattggttttattataccaagtaaactttttagaagagttgatttaccaagcccgttagccccgactaatgctattttttgtcctctttccatatataaatttaatggttttgtaagaggagagtcataacctataactaaatctttagtttcaaaaatagctttgcctgaagctctagcagatttgaagttgaattctggctttggcttttcttttgaaagttcaattatatccatcttatctagcttcttttgtctagacttagccatatttgcagtagcaacattagctttatttcttgctacgaaatcttcaagtctcgagatttctttttgttgcttttcataagcagcttctaatttttctttatttattgcatatatcctttggaattcatcataatctccaacatatcgtgtaagctttctttcatctacatgatatattaaattaactactgaatttataaatggaacatcatgggatattaatataaacgcattttcatatgattgaagatatctttttagccattcgatatgttcttcatccaagtagtttgtaggctcatctaaaagtaaaatatcaggagattgtaataatagttttcctaaaagaatttttgttctttgtccaccagataaatcatcaacgtctttgtctaaccctaggtctaaaagcccaagaccctttgcaacttcttcaacttttggatcaataacataaaatccgttatgatcaagcatgtcttgaattacagcagttctttccagcattttatttaactcatcctcagtacaatcccccatcttttcgtataaagaattcatttctgcttctagatcaaaaagatatttaaaagcatctcttaaggcatctcttatactttgacctttcattaatgctgcatgctgatccatgtaaccaactctaacattattagaccaaataacattcccttcatcaggcattagcttaccagttactatattcataaatgtagatttaccttctccattagcaccaataagaccaacatgttcaccctttaataatctaaatgaaacatcttcaaaaatagctctatctccaaatccgtgattcatatttttaacagtaagtatgctcatcaattacctccaaaaaacttataaaatttgcaactaagtaaaaagactcctaaaataagagaaaaataataagcttataatcactttttgtagttgcgtatccataatagtttaaagtataaaaagctagtatgtcaaagtaaatttaagaaaatttgtgtatattaaaaatatagatgagaagagtattgaaactataacaatatattcataaaatagtaaaattcattaaagctaatatttatcaattgcccaaagcaccttggttataaattatggttgtatatttacataatatgttataattttagtaataaaattcgtgtgtctataaattaaagaatgttgataattgtttagagactttacttgataaaacttttaattcaatgtgctagaaacgaaaagaggatatgctggaggcgtaattagatatttgaccagattatataagggggaagcaagatggaggatttggttactgatagattgctattaagaacatggaaagaggatgattacaaagatttatatgaatatgccaaaagtgagttggtgggtcctaacgctggttggatgccgcataaagatgaggatgaaagtagaaaaataataagaatgtttattagaaataatgaaacatatgctatagttttaaaatcagaaaataaagttattggtagcatagggcttcatgatagaaagcctgataataatttgttgaaactaaatcagaaagaagtggggtatgctctcaatcctagatactggggaaaagaaatcgttcctgaagctgtaaaatctttagtggactatgggtttaataaactaaatttagaattaatttggtgcgcacattttgattttaacaacaactcaaaaagagtaattgaaaagtgcggattcaaatataaatttaaaaagttcgagagattaaaatttttaaataataaagaggtaaccacattgtattattgtatttttagaactgagtataaaaataacttaagaatataaccaaatgttatgaatttacatgattctgactacaatagaatgtctaaagaacttttagaataattagttagtaaattaacattttgctgaatagtaagagaaaaggcgtgaaactaagctaatggataagaaaatatctattagcttaatttttatatttagataaaagttatttttgtttgtaagtaaaaattaatttagccgaatttctataataatattcctattttggggtaaacttttggtataaaaaaaatttttattgatggtattataaattgcgtaaattattatatgaaaggagatactatgatgttagatttaactaaggaaataaaagaaatggcagaaaaaatgggttacgaaatgaaaggtttggcagaagatatggggaatgaaatgagaaacgtaggagaattagtaaagtcaaaagcagaaaaattgactgatgaaataaagaatagaatgacaagatgaatataaagaagatagtaattacattattagtgtgaatgctatcttctttatatttatttaaaagtaacataaaaaagtagaaatcatattatatagtggacatggttatagggtaaatagactacctcgatctattaatttcccttttcttagtgcaatgggtaagatgtcatatttaaaaagaaatttctttatttgatctccccatgtgtaactatctaaatcaccaaagaaagccatcttattattagagaccataccaccgaccccgcctataaaaccataatttagtgaaggtagtagtatatctccgggaggaagcagaaggatgtcaaaatcgtaatttttaagagaattaaaaatccctttatcacttgtgattaaggctttttctctaacagggagaatagaacattttgtgtaaccttgaggaacatcaatgtgtatttttgaattttgagagtttaagagattttcatcgctatattttaaagtatgtataaaatagttttctaaaattaaagaatttaaaataatatcgtttggatatgtattggacaatgtgttttttgaaacaatataatttatgtcatttaatttaaggatctctttgaaattttctgagatatttcgttggataattatcttattaaatgaatcattttttagtacatttaattgaatatcaggatgaccatttatggcatcataaacatcattacatttagggactaatattggttttaggtctagtttggaaaggctaagtaattcttctttagtaattctataatcgacaaaacaatgcatataaattctccttataagaatgtataactgatatttaaaggcaaaataatcaatactgaaattattattttaaattatattttgcgctttaaagacagatatgtcaattaagtaactgctagaatgtataaaaattaatattttatcaactagaaatatatcatatgaattttgcatatcctcaaatttttaatacatactaatattaagaagggagtgaaatccatgcttattttaaaattagcttatagtgaagacttgactttttcccgtgacctgcaagagctaaaagagctactaaagaagaaggagattttaataggatttgttgaaagtatagaaggaaaaactcatataataaagataatttgtgaagaaaattgttataatgaaaaagtaaaagagattattaacttatatgttagtaatattttatatagaatagttattgataattatagaaaaaaggaaatgtttgaatttataacggataattattttttcttaaagcaatctgaaatattagaggttgaagatcaaatactaaaggtgttaaagtatgaagaagtagatgcaaatgaggatactatattttgtttaaataaaattaattctatggtagaaaagattagagactgcataagtgaaaaacaagagattaatatagatggatttataacttttaggatgagaaaattaagagaggatatagaaaaagttatagataaagtagtagaaagatatatggtggaaaaagaatataaggaatttataaaactactaaagtactttgtggaaatacaggaatgtaaaatagaagaaataaatataatagtagaagataataattatatagtaagagataaggaaggcaaagatttatattacgattttttcagtgaaatcgcaacagatcaaaataaagctgaattaaatatggaagatatattaattagcggactaataacaagtgcacctgaaaatataaatatctatggaaaagaaaaatgtagcaataaagaatttttagatactattcaaaatgtatttggagataaggttcatttttatgaagcaaatagcgactataataaaattggtcaaataatagcaaaaaaatattgacatggattaacaacaatgatatactcatacatgttaagaagaaacagccgtttctcaccctgcagtgttgaatttactagtatgggttttatgtgtgtctatacattgagtattgataatttgaggcggcagttatgccgtctttttattatgtatatagtttttcggaggtgaaaaatattaataaagatttttctatgaatgaagagattagagaaaaagagattagactaataggaagtaacggggaaccattagggattgtcccaactattgaagcaaaaaaacttgctgaagaaaaagatatggatttagttatgatgtctcctactgcgaaaccaccagtttgtagaattatggactatggtaagtatgtatatgagcaatctaaaaaagaaaaagatgctaagaaaaagcaaaaaatcatatctattaaagaagtaagatgtagtctaactattgaggaacatgacattgatataaaagcaaaaaatgccagaaagttcctattagaaggagataaagttaaaatcactgtaagatttagaggtagggaaatggaacttgcccacatgggacaaaaaattcttgataactttgcagctaaattagaagatgtctgcctagtagaaaaaagacctaaaagagaaggcagaaatatgacaatggttttagggcctaaaaaggcgtaacttgagaggaggatttaatcatgccaaaaatgaaaactcatagaggtgcagcaaaaagattcagaaaaacaggtacaggaaaacttaagagaggtaaggcatttagaagccatatcttaacaaagaagagttcaaaaactaagagacatcttagaaaagctggatatgtttcagattcacaattaaaagtaatgaagaaattattaccatacctataatataggggtaatgcaggaggtttaagtaatggcaagagtaaagagagcgaagaattctcgtaaaaatcataaaaaagttttaaaacttgcaaaaggatactacggtggaaaaagtaagttatataaaactgctaatgaatcagtaataagagcattaagaaattcttatgttggaagaaagaataagaagagagattatagaagtttatggatagctagaattaacgcggctacaagaataaacaacttatcatattctaaattcatgaatggaatcaaattagctggaatagacatcaacagaaagatgttatctgaaatagctataaatgatccaaaggcatttactgaattagtagaagttgctaagaaacaattaaatgcttagtacataaaatgcggcttatgccgcattttatttttatattcaaatataaataataatactattatttttccataatcctatagttttgaggtgtaaaactttgatatatatagaaagtaaagaaaataatttatttaagaatacaaaaaagcttaaagaaagaaaaaataggactaaaacaagtagatatataattgaaggatttagattagttcaagaggcatttaaggccaaagtcgatgtggattacctaattgtgactgaagatgcacatgataaagtagacgaatttttggggaaatatataaatggtgaaattaagatttatgaaatttctagcaatttatttaaagaacttatttctacagaaaatcctcaaggaatacttgcagttataaaaatgaatacaatggaatcgaaattcgatggagatttttacttgctttgtgacaaggtgcaagatccagggaatctagggactataataagaactgcacatgcagctggagtacaagaaattatattaacaaagggtactgtggatatatataatgaaaagacaattagatctacaatgggatctatattttatattcctatttattatgatgatgagaatctctctttggtaaaagaattaaaggggaaaggttttaatttagtagtgacatccttagatacagataaaaatttctttcaagcagatttaagagggagagttctcttaactgttgggaatgaaggaaatggagtaagtagagaagtgttagagatggcggatactaaggttaagataccaatgccaggcaatgctgaatctttaaatgtagcagtagcttcatctgttataatgtatgagaaagtaagacaaaatcaattgtgattaaatcttattaaaataggaaagtatattaataggtttctaggaaaatttgaaactatttaagaatgaaagtagatttgaatatttctaggaatctatattaatatgaaaaaattttaaaatttatatatttatctatgtaaattttaaaatatataaatatttataggaaacatctggtgttcagaggttttatatttaaaatagaataatcatgttaagataaaatatttaatttgatttgggaatatacttataaatatggtatattaaaaaagcagtggatttatatataaattttgaaaatagtattgatattttatatatttatttgtataatgagttgtattaattgaacattgaaaaactgtgaatgagagagtagatattagaaaagttttaagggagagaaggtcatagactgtaagccttcttaaataatataatattgaagttcgctcaggagttctagctgtgaaatttatagtagtagctagcggcaagaagagtcgttaattaaattgagttgggtacttttttagttccaattagggtggtaacgcggataattcgtccctttttatgaggtggcgtttttttttatgcaaaaaatctttttaattaccaacaaatgattttaaaagaaatatttataggtctattattatttttatatgtcttattgaaaggagaaacaataatgaaagaaaaacttaaagaattacaagaacttgcattaagcaaaattgaagctgttaaaactagcagtgaattagaagaaattagagttaagttcttaggaaaaaaaggggaacttactacaatattaagaggtatggggaatctttctccagaagaaagacctattgtaggaaaattagttaatgaagctaaagctgctgttgaagaaaaattagaaagcgtgttaaaagctattaaagataaagaaaaggctgaaaagcttgcaggtgaaactatagatatttctcttccaggaagaaagaaagttataggaaagaggcatccgttagatttgactcttcaaagtatggaagaaattttcgtttcaatggggttcacaattgaagatggacctgaagttgaatatgatcattataattttgaagctctaaatatacctaaggatcatccggctagaagtgaacaagatactttatatataaatgataatatagtacttagaactcagacttcaccaattcaagttagaactatggaaaatcaaaaaccaccaataaagatgatttcccctggtaaagtatatagatcagattcagtagatgctacacattcacctatattctatcaaatggaaggattagttatagataaaggagttacatttgctgatttaaaaggaacattagaattatttgcaaaaaaaatgtttggagacaaggttcaaactaaattcagaccacatcacttcccatttacagagccatctgctgaaatggatgcaacatgctttgtgtgtggcggtgaaggctgtagagtatgtaaaggcagcggttggatagaacttttaggttgcggaatggttcatccaaatgttcttagaaactgcggacttgatccagaagtatatagtggatttgcttttggttttggtgttgatagaatggtaatgctaaagtatggaatagatgatataagattattatatgaaagtgatatgagattcttaaatcaattctaaaagcttaattttatttgaaattcaagaatttaagaatatacattcttaggaatatctattctgaagaatattaccatatatattctaaagatatgcccatatgaaaaaagcagctatgctacaactaagattttttgaatattaaaaatgagggttagtgaagaaattggattaaaatattattctatacccagcaataaaaggaggaaacaaaatgaaagtaccatataattggcttaaagattatgttgatataaatgttagtcctaaggaattaggagataaattaactttaactggttcacaactagaagaacttgttatccaaggagatgtaattcaaaatgtagttacaggaaaaattactaatattgaaaaacatcctgatgcagataagttaagcatatgtcaagttgatataggaagtgaacaaatacaaatagttacagcagcaacgaacatgaaagagcaagatgttgtgccggttgctcttcatggttcaacacttgctgacggaactaaaataaaaaaaggaaaacttagaggagtagtatctaatggtatgttctgctcagaagaagaattaggtacagctggagatgagccagttcatggattgatgatcttacctactgatactaagcttggagttgatattaaggaacttttaggattaaataaagctatcttagattttgaaattacttcaaacagacctgactgcctaagtatggtagggatggcaagagaaacagcagcagctcttagaaaaacttataaaatgccaaatttagaatataaaattaaaaattctaaaaatataaatgaagagttaactgttgaagttaaagatactctttgcaataggtatatggcaagaggcgtgaaaaatgttaaagttcagccatcaccaggctggatgcaagagagacttcttgaagctggtataagaccaataaataatatagttgatataacaaattttgttatgcttgaaactggtgaaccaatgcatgcttttgataaaagagaaattgctacgaataaaatagtaattgaaagagcaaagagaggagaaaagtttacaactttagatgaagtagaaagagaattagatgattcgatgctttgcattaaagatggagaaaatattatcggtcttgctggaataatgggtggtttaaactcagaaataaaagaagatactacagaagttgtttttgaatgtgcaaattttgatggaactaacataagagtaaattcaaagaaattaaatctaagaacagaagcgtctgggagatttgaaaaagatatagatcctaacttagctgaaattgcattaaatagagcatgtagattaatctgtgaattagatgccggagaagttatggaaggtactatagatgtttacaataacaagaaagaagtatcaactgtaactgttgaatcaaattgggtaaacagcttccttggaacagatctttctaaagaagagatgaagagatgtttagatagtgttgatttatttacagaaataaatggtgataacttagttgtgacagctccaacttttagagttgatattgcaattagagaagatatagctgaggaaattgcaagaatttatggatatgaaaaaattcctacaacaatttttaaagtttctacggaaagagagccaagatatagaaaaggattattagataatagagtagtgatgcttgctacaggaagtggattaaatcaatctatcagttattcgtttgtatctccaaaggtttttgataaaattaatttaccagaagatagtgaccttagaaatgtagttaagataagaaatccattaggggaagattatagtgtgatgagaacttcaacacttccatcaatgatggaatcacttggaagaaattattctagaaataactcatatgtaagattgtttgaaatggggaaagtttacattccaaatgtggatgaaacaaaacttccaacagaaaagaatattttaactataggtatttatggagattgtgactacttagatcttaaaggtgttgttgaaaatataactgatggattaggtataaagagtgttaaatatgaaagagagagcgaaaatgtaagttaccatcctggaaaaacagctaagatagttgttggcagaactaatgctggaactttaggagaagttcatttagatgtatgcgaaaattacggtttggatgtgccttgttatgtagcagaattagatttggatgttttatatgaaaatgctgatatggataaaaaatataaagcacttccaaaattcccagcagtaacacgagatattgcattacttgttgatgatagtcttttggtccaagaaattgatgatacaataaaaagagctggtggaaatttagttgaaaaagtagaattatttgatatatataaaggaaaacaaattccagatggtaaaaagagtatagcttatgcaatctggtacagagatgaaaataaaacattaacagataaagatgttaataaagttcatgaaaaaatcctaaaatctttagaatataagcttggagctacattaagagattaaaatataataactcaagctttgctccatgaaagctgcttcagaaataagttttattatttttgaagcagctatttttatttatacaaaaaaatataagtttaaagaaggaaatatcatgtttctatagaataagtatagataaagtggttaaaagtggtgttaagtggtttaaaatagagggaaattacctaatcaataaaagtaggagctgagaatattgttcattggggaatatcaacatgcgttagatcctaaaaatagaataattgttccagcaaagctaagagatggacttggtaataaatttgttattaccaaaggacttgatgggtgtttgtatgcttatccgcttgatgaatggagaatattggaggataaattaaaaactttacctttaacaaataaggatgctagatcctttgtgaggttctttttttctggagcttgtgaagtcgagttagacaagcaaggaagaggattgattccacaaaatttaaaggaatatgcaggtatagaaaaggacatagtaagtattggagtattatctagagtagaaatatggagcaaggaaaagtggagcgaatataacgaatcaaatatagactttgattcaattgcagaaaaaatgaatgatttaggaatataaggagtttttattatggaatttaaacatgtatcggttttattaaatgaatgtatagaggcattaaacataaaggaaaatgggatttatgttgatggtactttaggaggagcaggacactcatctcatatcttaagcaatctttctaaagatgggatgcttattgggatagatcaagaccaagacgctctaaaggcagcaaaagaaaaacttaaagattttgaaaatgtaaagtatgttcatagcaatttttataatattgatagtattttaaacgatctagatattgaaaaggttgatggaatcttgatggatcttggagtttcatcatatcaacttgatgaagcatcaagaggttttagttatatgaaagatgctccgttagatatgagaatgaatagagaaaatgatttttcagcgtacaatattgtaaataattacgatgaggacagcttatataaaataataaaggactatggtgaagaaagatttgctaaaaggattgcgaattttattataaatagaagaattgagaagcctatagaaacaacttttgaacttgtagacattatcaaggctgcaattccagcaaagatgagaagagaagggcctcatccggctaaaagaacttttcaggcaattagaatagaagttaattcagaattaaagatacttaataaaactatagaggatggggtgaatagattaaataagggtggaagaatggctattataactttccattctttggaagatagaatagtgaaattaaagtttagagaattagagaatccatgtacttgtccaaaagaatttccaatgtgtatatgtggaaaatcgccattagttaaaaatatagctaaaaaaggtattgcaccaactaaagaagagattgaagaaaatccaaggagtagaagcgctaagcttagagtaattgagaaattataattattattatgttataaatgagttgggatgtgaataaattgggaagaagagaatatgattatataaaagggaatacagtattagctccagaaagaaaaacaagagtacgtaaaccggataaaaaatataaacaaatacaaagaagaaaacaaattataagtaaaaatatcctattaaaaaacaggagaaaaaatgataggaaatacttactaactgtggcagttgtcatatttagtttagggtttattactattcacggagataacaaggtttatactatggaaagcaatgcgagaaacttggatactcaaataaaacaaacacaagaagataatgaggcattaaaagtaaaaatattgaaattttcttcattaaataatattcaaaaaaatgctgaaagcaaattggcaatggctattcccaaaaaagaacaaactataaaagttgatttttcacagaattattttgaagatttaaaacctaaaagttccgaaaatactgctaaaagtaagaacatattctctaaattaataagtttaataaaataataagttacttaaaataataaaaaataagtaattatattagaaaattaattggctttatcttggttcttttgggttttatgtaaaagaaagtgtgcatgggggaaataaaagttgaaaaaaaagaattataaagatagggcaaagatgcgccaaaggatgagtatagcagcttttgcgttgacaattgtttttgtaatattaactcttagactttcttatataatgatagttaaaagagctgattatgcagcaagagcagaagaacagtggacaagtgaggtaaaaatagatgccataagaggaaggatattagataggaatggtaaagaattagcggtatctgcgaatgtttatagagtagacttcgatttgaactctataagagcatatttatcaagaggattaaaggatttatcaaaaacagaaatagagcatatgaaaagtgtaggaattccaataccttctggagatgatggattaaaaactgatgatattgcgcctgttattgcaaaggcattagatttagatgtagataaagtaaaagataagcttgaaacaaggctcccaagtggagcaaaggctggatctgctactttaattagaaggatagaaaaagaacaggcagataaggtaaaagatcttaatataagtggagttttagtatcaccagatactaaaagatattatccgaataataatttcttatcacatgtacttggaagtactaatgttgatggtaaagggcttacaggagtagagcttcaatataattcgtatttatcaggaattcctggaatgaagatagcagaacttgataaaaataatagagatttaccttatacaatatctcagtttacagcaccggtaaacggtaaagatgttacacttacaattgatgagaatatacaaaattttgcggaaaaagctgccacacaagcttataatgatacaaaagctaaggcagtctcaattcttgttatggatcctaaaacaggtgaagttttagcaatggtaaacaaacctgattttgatcctaataatccgcgtgatggtgcagataaatttgatggggcaaattcagatgacaaagtacaaaaaatgtggagaaataggcttgtaaatgatacttttgaacctggttcaatatttaaggtagtaacagctattacaggtcttgaagaaaacattgtaaataaggatagtaagttttattgtggaggttcattaaaagttggaggaattactcctaagtgctggagaactcaggggcatggagcagaagtattcccagacataattcaaaattcatgtaatgtaggcttcatggagcttggggcaatgattggaaaagaaaaattatgtgaatatattaataaattcggttttggaaaagcgagtggaattgatttacctggagaagcaaaaggaattgttaaaccagttgataaggtttctgaggcagatcttgctacaatatcttttggtcaaactaatacggttaattcagttcaatatatgactgcgtttaatgctattgctaatggcggaactttgatacaaccacatgtaatgaaagaaatcactcatgaagatgaaaataatgttaatattgtcgatgaagcttttaagcctaagacaacaacagttgcaagtactgaaaagacagcagaacttagaagttatcttgaaagggttattactgggggatctggaacaggaacatttatagaaggttaccatataggcggtaaaacaggtacggctcagaaagttattgatggaagatatcaagaaggtaagtatatatcttcatttgttggaatggcgcctgtggatgatcctaaaattactatgatggtaactattgatgaaccaagtaatggtgcttattatgcggcacaagtagctgtaccgccagcaaaaccattatttactgatatttttaattaccttaataacaaattttctgatgaaaatatgggacaaattactagagatgttattatcccagaagttagaggaatgaaagttgatgatgctaaaaaagcgttgaaggatgccaagttagattttaatatagatggtgatggggagtcagtagtaaacttaacaccatatccaggatattcggtaaaagaagggtcaaaaataaatctttatacaagtagcgatggaacaaataataataatgttgtaatgcctgatgttaggggatattcaaaggaagatgctaatacactattgaagaagcttggaatagtgcctgcctttgaaggaagtggagcagtctcagaacaagatatttctcaaggtgaagttataacaaagggaacaactgttaagttgacattaagttcagactataaggattaaaaagtgagaataaattaatactaaaactttaaaacgaaacgggtatgttttgtaagggggttggtatgaattatacaaatgaaaaaatattagtatgtgagaattctcgcatactaatattttttagtaataatatccgttatatatttacgtattttattagaattgttaaaagcaatactcagctaataggtgaatatctaaattagtgttttattcagaggaaaataaatggaggaacaggtattgaaaaagaaaaaacatgtaagtaaggtaaaaatacgaaagagaacgagaagtgtcgctttttcattaacagctatttttgctatattaataattagactctcttatataatgatggttgatggaaaagactattctgcaagagctgaagaacagtggacaagtgaagtgaaaatagatgctaaaagaggagaggttctggatagaaatggaaatgagctagctgtatctgctaatgtctatagagtggattttgatttaaattcgataaggaattacttgaaaagatctgtaaaatccattcccaataaagagcttaccaatatgaaaagtgtaggaattccgatccctacagaaggaagtggcttaacaaacgatgatattgcacccgtaattgcgaaagtattgaatatggatgtgtcagaaataaaagcggatttagaaaagaagcttccaagtggggcagatgcattttctgtgactgtagcacgaaagatagaaaaagatatagcggataaagtaaaagaacttaatataaatggaattatagtttcgcaagatactaaaagatattatcctaataataattttctatcgcatgttttaggaactactgatcctgatggcaaaggattaagtggtgtagaacttcaatataattcatatttgtcaggaattcctggaatgaaggttgcggagcttgataaaaataatgaagatttgccttatacagtttctcaatatacggaacctgtaaatggaaaagatgttactttaactatcgatgaaaatatccaaaacattgttgaaaatatagcacaaaaagcctataaagatgataaagctaaagaagtttcgatattagtaatgaatcctaagactggagaagttctaggaatggtaaataaaccagattttgatcctaataatccatatgatggagcaagtaaatttgatggagcagacctcactgataagatacagaaaatgtggagaaatagattggtaagtgatacgtttgaaccaggatcaatatttaaagtaatcactactatatctggtctagaaaacaatgttgcaaataaagatacacaatttgtggataatggatcaatatctgtagggggaattgtagtgaaggatgcggaacgagaaaataaacttcaaaatttacttcaaatcattcagaattcatcaaatgtgtgttttgtaaaattaggacaaatgattggtaaagacaaattgtatgaatctattaataagttcggattcggaaaagtaagtggaattgacttaccaggggaggcatctggaattgtgaaaccaatcgataaagtttcagaagcggatcttgcaacaatatcatttggacagactaatacagtaaattctgttcaatatatggctgcatttaatgctattgctaatggaggtactctaattcaacctcacgtaatgaaagaaattactcataatgatgaaaatagtgttaagattgttgatgaaacttttaaacctacgactgctacagtcgcaagtgcagaaaaaacagcagaacttagaagttatcttgaaggtgttgtaactggaggaacagcaactggaacttttatagagggatatcacattgggggtaaaacaggaactgcagaaaaggttgttggtggtaagtatggagaaggcaaatatatatcttcatttgtgggaatggctccagctaatgatcctaaagttacagttatgataactgttgatgagcctagtaacggtgaatactatgcttcacaagtagcagtaccatatgcaaaaatgctgtttacaggtatctttaactatttagatagtgcatcttctaatgagaaaattgttaaggatattattatcccagaagttagaaacatgaaagtttcagatgctgagaaagtattaaaggataaaggcctagattttaatatagatggaaatgaagaaacaatattaagtatgaagccatatccaggttcatcagtaaaggaaggttctaaaataactctttacacaagtggggatgcgacttataataataatgttgtaatgccaaatgttaggggatattcaaaagaggatgcgactactttattaaaaaatcttggaataacagcaacttttgaaggaaatggagttgtttcagtacagaatatttcagaaggtgaagttatacctaaaggaacaactgccgagttgattttaagttcgtattatgaagattaagaataatggtagatatataggaaatttaaattaaaatcgctttttgcggaaaatttaaagtaaattggcgaatgataaaatactagcatgtgggggtgctcgcatgctatatttttttatcatataagttctaattaatggatttcatagttcataggatcattacatacaaaataaatcatattcgttgagattagataataattgtgcatttaattttcttaaacgtaataattattaatataaaaaataaattaaaatattcatataccataagttaattaggaggaattcaatatgaatttgaaaagtattttaaaaggaatagattatgaatcaattcagggtgatattgatattgaagttaacaaaataaactatgatagcagaaaagctggcaatgatgatgtttttgtctgtgtaaaaggatatgcaactgatggccataaatatatagaaaaagctattgaaaacggagcaaaagttatagtaatccaagatgatatagaaataaaggatgagaatattaccattattaaatgcaatgatacaagaaaagcattggcattaatgggagcaaattattatgataatcctagttctaaaataaagataattggagttactggaactaatgggaaaactactacagcttttatgattaagcatattttagaagaaagtaataaaaaagttggtcttatcggaactattgcaaattttataggtgatgaaaaaattcatactgaaagaacaactccagaatccttagagcttcaagaattattttctgaaatggttgataaaggtgtagagtattgtgttatggaagtgtcttcccattcattagcattagatagagtttatggtattgaatttcaggttggaatatttactaatttgactagagatcatttggattttcacaagacttttgaaaattattataaggcaaagtttaaattgtttgaaagatctagaataaaaattgttaatgttgacgataattacgggagacaagtaattagtgatttaaacaatttaaaatgtgatgatatatattcattctcagtaaaaagcatttcagattttaaagcttttgatgaagaaatgggaagtagagaaatcaaatttaaactcaacttgaaagaagatgagcaatttgttttaaatataccaggtgaatataatatatataatgcgttaggtgcaatagcagcgtgttttaaattaggtatgcctataaaggatataaaaagcggcattgaaaatgtagtagttttgggaagatgtgaaagagtagcaaaagaatataatttaggttatgaaatcatcatagattatgcacatactccagatggtttagaaaatatattaaagacagctaaggcatttacaaaaggaagattgatatctgtatttggttgtgggggagacagggataaggtaaaaaggcctgaaatgggtaaaatatctacagatattgcagatattacaattgtgacatcagataaccctagaagtgaggaacctctaagtataataaaagatattgaagctggaattgataaggataattattttgtaatagaaaatagaaaagaagcaataaaaaaatctatagatatagctctagataatgacgtaatagttattgcgggtaagggtcatgaaacttaccaagtattgaaagatgaaactatacattttgatgaaagagaaattgtaaaagaaatattagataacatgaacaattaggtagcttattcataatgtaacaatgacggatttaagcgatatttaggattgttattttggtgatgaagttaacaggaaaataaggggtggatgaacttggatttaaatttagcggaaataattaaggcagtggatggagaaataatagttaaaaataacgaaggtatttttaataagatttcaactgatactagaaaaattcaggaaaataatttattcattgcattaaaaggagagaattttaatggcaatgattatacaatacaagctatcgaaaaaggggcatctataataataattgatgatgtgaagtttaaaattgaagagttaaaaaataggggaactattattaaagtaaaagatactaaagaagctttaggagatttggctaggttttacagaaagaaaattggagtaaaggtagttgggataacaggatctactggtaagacttcaacaaaagatttagtagctgcatttctaagtggaaaatacaaagtttttaaaactcaaggaaatttcaataacgaaattggattaccacttatgatatttgaactttctaaagattatgatatagctgtccttgaaatgggaatgagtaattttggagagataaacaagttggcgagtattgcacttccggatgttggtgcaataactaatattggagtggctcatatagaatatttgaagactagagaaaatatacttaaagagaagatgtctataacagatttctttgaaaacaaaaactcattaatagtgaactgtgaaaatgatatgctaaaaacaatagttgagtgtgataagtttaatttagagagagtaggttatgattctacttataatctttactctaagaatataaaattaacatctgaaaatacttcgtttgatgtagttactgatgataatgaaaattatagatttactctaaatatggtcggagaacataatgttttaaacgcacttataggaatacaaatagcaagaaattttgggttgacttttgaagagatggaaaaggggttagggaattttaatgctacttctatgagacttgaagttataaataaagataagtttactattataaatgattcttataatgctaatccagattcaatgaaagctgcacttgaagtgctaaaaaattattctggatcaaggaaaatcgcagtacttggaactatgggtgaacttggagattatgcggaagaagcacatatccaagttggtgaatttgcgaaagataaggcagatattttattgactactggtgaatttaaagagtattataagaaaggctttggagagcgtacaatggtgtttgagagtaaacaagaattaatgcagaggttaactgatatgattaaagtaaatgatactattttaattaaagcatctagaagtgcaaaatttgaggaaataaccaaatatctatagaatttaaaataacacgaaggaggtgacttgccttaattaggatcttcaagaaaataattacttagcatgattattttctttcggatattttaggcaacactggatgggggaagcaataaacttattaattaactcaaaaattttagcaccattaattatggggttcttattttcaatagtacttggaccaatatttataccgatattacacaagttgaaatttggtcaaaatataagaaaagaaggacctaaaagtcatcagaaaaaatctggaacaccaacaatgggagggcttatattttttatagctacagctacagctatattaattatggggcaaaaacctatgagtagagaaatgatattactttattcatttttagcttttggatttattggatttttagatgatattttaaaaataattcataaagataatctaggattaagagcagcgcaaaagatgattttgctagtcttattttcagtagctttagcatggtatggatatacaaatgtgggtacagatattttgattccatttataaatcaaaattttagattgaatttaggaatactatacataccatttatagtagtatattatgcagcagtaactaatgctgtaaacttaactgacggaatagatggacttgcaacttcagttacggttatagtgttaactttctttgctatcattggttttagaacacagaatgttgaagtagcagtttttgcaatagcattagctggagcattacttggatttttaaaatttaatgctttccctgcaaagatatttatgggtgatacaggttcgctagctctagggggagttattggaacaatagcattaatgttaaaaatggagttgtttgtgattatagttggaggaatatatttaatcgaaacattgtctgttataattcaagttacatcatttaaattaacaggtaaaagagtatttagaatgtctccgatccatcatcactttgagcaagttgggtggagtgaagtaaaaatagtaacaattttttcaagcattacagcaattttatgtataattggctttgtagcactttaagttaagtagtagatttggaggatttatgtatgaaggtcattgggtccaaaagaaaatcaaaaatgggtgaaatagattatggaatattttatacagtagcattacttttaacaattggtgtggttatggtatattctgcaagttcttattatgctatgtttatgtataaagatagcatgttttttctgaaaaaagaattaatggcaggggttgttggagttatagcgatggcagtagcgatgagtgttgattatcataagataaagaaatatacggctataataatgatagcgactatacctatactattagcagtatttctttttccaggaactaatggagcgcaaagatggattaatttaggtccgttaagctttcaaccatctgagcttgcaaaatatgttgtggtgctctttttagcaagaagccttgaagtgaaaggtgaaggagtaaaagattttaaaactggaatagttccttatttagctacatcaggattttatgcagctattgtattagctgaaaaaaatttaagtatagcttctgttataatgatagttacatttcttgttttgtttgcagcaggtggaagaataaagcatttatttggaattgttgcgccagcattagttgcagcagcagttgcatttacagtattagaaccgtatagaatgaaaaggctaatgagttttacaaatccatggaaagatccaataggagatggatatcaacttatacaatcattttatgcattaggtgctggaggggttacagggcttggtcttggccaatcaaggcaaaaaactttgtatatgccagagccacataatgattttattttctccattatcggcgaggaattggggcttattggatgtgtatgtataatattactttttgtaatatttgtttggagaggaataagtgtagcgatgaaagctagagacacatatggtactcttcttgcaataggcataactggagttgtagcagttcaatctttaataaatattgcagttgttacaggatcgatgccagttacaggggttccgctaccgtttattagttatgggggaacttcattagtaataaatatgacggcaataggaatacttttaaacatatcaaggcaaactgaaggaaaagatgaatttaaggaaatataagaaaatacagggcaaagaattagaatacaagtctttgccctgtattttttaggtaattatttaaagtagttttaaattttagatgaaaatatatcgttaaagtggtattattatatatgaaatttatactaaagattataaaataataagtgttagaatatataaggcatagataagaatagggatgggtatggtaaaaacgaataataataaattgatcttgaggtcgcagagaagaagactaataaggaaaataattatgactattatagtcctatttatagtgggaacaatttttgcaataaaatcgaattttttcattattaaaaaggtttctattttaggtaatccagtaatgagtggagaagatgttaagaatggtacagagaatctaataggacagaatattctatttataaataaacaaaatataataagcaatgctaaaaagaatccatacgtagaaaatgttgaaataagcaagtcgtatcctaaacaagttaatataaagatctcagaaaaagaggggatttattatgttgaaaaagatggatataaatatgttttggataatgatggaaatttacttgaaaaaacagatagcgttgaaaacagaagtttagttaatgttaaaggaatagatttaaaagatgtagcgctaggacaaaagatgatagatgacagtagagtattagattttttagatattttttatcaaattataaagataaatccgacaaattataaaattgattatgttgatataagtgattttactaacataaaggtatatgttggtgaagtagaaggaagacttggtaatgatgaaaatataccagataaaatgaataaattattacatataattcaaaatcctgatatagggattgttaagggatatgtagatgtaggatttaatggtgcgcctgtatattataaggaagaaaggtaggtaattaatgaagatatctagatcacaattatttatagcaattgtttgtggacttttaggctttttattggcatatcaatttaaggtattatcaaataagaatatagaatcaaaaattagtaattatgataaaaacgatattatttcagaagttgaatctctaaaaaaagaaaaagaagaattagcgtcaacaaattcaaagttatccgatcagttaaaacaaatggaagaaacagcagctaaaaatggtgacatggggcaagatataaaaaatcaacttgatgaggctagaatgcatttaggtatagttgatgttaaagggcagggcattgttcttacaataacacctaaaacatctatttttggttctacgacaaatgatagtagcagagatctaggagaagatgaattggttcatatagttaacttactttggtattcaggagctgaggcaatatctataaatgatattagaataacaccacaaacgggaataaaaactgctggaaatggaatagccataggttcgactgggaaagtttatcctagagataaaattataattaaggcaattggagacaagggcagacttaacgttggaatttctttcccaggttcattagaatatcttgctcttcctaactacaataatgaagttaaatcagaagatgatatatttataggaaaatcaaaacagtcattgaagagtgactttattaaatcagttaaagaataggagagagttaatttgatagcaattataggactactaatcggaataatacttggatttgtattagatgttaatatatctgataaattgtcaccatacatgtctgttgcaatactagcatgtttggattcagtttttggagcagtcagaggaaatctctctaaaaactttcaagcagatatattcatatctggattttttggaaatgcattacttgcagcaggacttgcttatttaggtgataagcttggaatacctatatatatggcggcggtaatagttttcggaggaagaatatttgataacttcgcaataatacgaagactattattagaagaatttaaaataagaagaagaaataggtctagaaataattctatagataaagaaaatcatgatgataaatagagaggtgatgtgatgaaaaataataaaggttttttctttgttttcattgcaaccataatattaggggttttaatatcaatgaattttaattttaaaggtattcagtcctacagtcaattaaatgcaacagagtaccaaaatgccgttgaagaaagggcagcattatatagagacattggaaatcttcaagaagataataatgagaaaaaagataagattaggaattatgctcagaatgataaaaaaaatgataagatccttgatgatatgaaaactcaaattagtgattataaatcatttattgggtcaaataacgtagagggaccaggaattatacttaagataaatgatggaactacaaatgctcttgaagaaaatacagatgaaataaataataagctcttacatgataatgatatggcgcttgttttaaatgaacttagagtggctggagctgaggcgattagtgttaataaccatagaatacttccatggtctggagtaatttgtaattgggcatttttagggtttgatgatggtggaatggagtatgctccttttaatatatatgccataggagatccagaaaaattgaaggcggctttacttgaagatggaagccatgttaaacaattaatgcttagaaaactttatgttgatattaaagttgtagataaaataatcatgccgccaacgacagcaaattcaaatgtaaaatatatgagtagagatgaaagtaaaaaatgaaattaattgatatttaggaaggaaattttaagtttatatagaatattatacaaagtgataaagaaaggaataatttagtaaggtgttatagtatgggaattaagcaaaatattgaagaactaagatccaaaattccagaacaagtaacgctcttagctgtttcaaaaacgaagccattagaggctctagaagatgcgtatatggcaggaatgagagattttggggaaaataaagttcaagaattagtaaaaaaatctgaaaattttcatgaggatgtacgatggcattttataggacagcttcaaagtaataaagttaagtatttagtagataaggtacatttgatacattctttatctagtattagtttgctaaatgaaattgaaaagcagtttagtaaagttaacaaggttgctaatactttaatccaaattaatattggaagagaggaaagcaaaagtggaattttggaagaagatttatatgaattcatagaagcaattgaaaaatgcaaatttgtttctgtaaaaggtataatggctattattccaataggggatgaagaaagcaatagaaaatattttaagaaaacaaaaaaaatatttgatgagcttaaggaaaaaaattatactaatattagtatgaaaatattatcaatggggatgactcatgattttatgacagctatagaagaaggttctaacttagtaagaataggaacaggaatatttggagaaagaaattataatttaggaggcgaaaataatgggtaatgttatatcaaaagttaaatctttattagggtttgaggactacgaggagtatgacgagtacgaagaagaacaatacgaagaacaggtgaaggatgaagacgaaatagaacctgttattaccaataagaagaatagtaaggttgtaaatatccatacatcttcgactacaaaggtaacaataactaagccaatcgattatgaagaggctactgaaatttgtgaagcacttaagaatagaagaatagtattagtaaacacaacggttttggaactaaagattgcacaaagattattagatttcatcagtggttcatgttatgctttaggcggagaattacaacaaattgaaaagggagtatatattctttcaccatcaaatgtagaagtaacaaatgaattaaaaaatgaactaagttcaaaagctctatttaattggtcaaaataggaggtataaattatgatatatagtgtttacatagttattgatatgtttctaaacatattagagctagctatattcatagaatgtatagtttcgtggataccacaaattcaggggaataaatttattgatttactacacagttttgttagtcccgttttagaaccaattagaaagttacaatatagattaagtcctggattaccattggatttttcacctatatttgcattgattattataaattttttacaaaggattataccataaattatgaaagaaagaatagcaaagtattttgcagatgatgatagaaatgatgcattgaatttatatgagaaatatttactagctagagataaaaacataactgtatttggaaaaagtttttatacaccaaatatatggatgtggtttgagaaaaacctctctagcaatgatttaaaaattgaaagtaatggacttttagatgattctgaaagaagaatggtttcttttaataacatatataaaagtccatttcctatgaaattgattaaaattgaaagtacctcgaaattttctaatcttactcatagagattttttgggcggaattctatctctaggaatagaaagaaataaaataggtgatttattagtagataataatacatgttatgtgccagttcacgaagaagtagaagatttcattatatataatttaaacagaatttctaaggttatttgtaatgtaaaagtggtggatgattttggatttttaccaaaggttaattttgaagaagaagtagttttagtttcttctttgagaattgatggaattgtctctaagattataaatatatctagatctaaagctcaagcaatgatcgagcagggtcgagtgcttatagattacgttaagataaaagataaaagttatgaactaaaaggacaagaaagaattactataagaggttttggaaaatttatagttggtaattctgttggaaatagcaaaagtggaaggataaaaattattatcaaaaaatatacataatagaggtgaaagtatgaagttgacaccaatggatataaacaacaaggaatttaaaaagggattaagaggatataattctgatgaagttgatgaatttttggatgaagtagtagataactatgaagagctttataaagaaaatgcaaatctaaaagagaagcttgctaatttgaatgaaaaggtagagcattactctaaaatcgaaagtactatacaaaatacattgatattagctcaaaatgctgcagagcaagcaaaaaattcggctaaaaaagaagccgaatttatgatgaaaaatgctaacgaaactgctcagaaggttatggataaggcacataatgatgttattcaaataaatgatgaatatgaaagagttaaacaagaatttattaaatttagagcaaaatatagaaacttcatgaatgcacagttagaaacatttgatgatttagagaaggattttataaaaaattataatgtatctgatcctatagaagatgatgaagtaactaatatagaaaaaatagttgaaaaagaagttgcaagcactacgagtggattaagtgaaaatatagaggctgaagaaaatgatccttcattgaatgatgaattaaatgagattaaaagtttttttgttcaaggtgaataaatttactatccaacagaaataatgaataaaaattatgcatattttatttacataacgtaataaaatgaagattatgtattttttgaataatagaaaagctatcctgaagcgattaaggatagcttttctatatttgcttaattacagataaccaaactaagacctgaacttatgcatataactcgccgaaatgagtaaaatacgtttattccagtttctgggtaattctaaggctataaagttgcacccaaagtgctagcctcaaagaacaggcttttaactagcacatttggaacaacttatagccaaagaatcacatccatcaaaattactaatgaaacattccatattattacccttgtggttacaaaagtattttactcatttctggttggaatatatttcatagtctaagtagagtttgtgattgtgttatctataatattattcctttgggatttcagaattattaaatttagtatttagtattactatatcaactcttctgtttgcagctctgccatcttcggtattgttatctttaacaggtctatactctccatagcctactgaagataacctctcgggtttaacgtttccctttgaaattagaaactctactacatttgcggctcttacagctgaaagctgccagttagaatgaaaataatcattattaatagcaacattatcagtatgtccttcaacatgtatatagttatcaatatcgtttaaaatctttgaaatagatattagtttaccttgccaatcaggtttgatagtagattgtccactattaaagaatacgctatcattgaagcttattatgagtcctctttcttgaatagatgtagtaacacttccttttagctcggaatcattgacaagatcatctactttcttttttacatcggatagtttttcttcttctgctatagagtctgaattgttctgagtattttgttgatcaattacagtaggaggagaatttgagctatcagatactgctattacgttttctccattaccactattaaatccaattttcaatgaatttgctagagtttgagattttttagtatccacattagaaatagcatacatcattaaaaagaaaatcatcattaatgttataaaatcaaggtaagataacatccatctctcagtatcatctttttctttttttgtattctttttcataattatacctctttaaattccttctaaatctttagcttcatcttcggttagataactaacaagcttactcactaaggtatttggattaactccttcttgaatgagtaatactgcttcaatgatcatttctttttcagcaatctcttctttatttatttctcttaatttacttgctataggaagccaaaaaagatttgctgtagcaagaccatatagagtagctacaaatgcaacagcaattttttcacccattgcagctacatcacttaaagcgctcaatattataactaaactcgttatggttcctactattcccatagtaggagcatagccacctgcagaggtgaacatttcaatacaattttcatgtcttgtagaaagctgttcgagcttggtatttaagatgcttttcacagaggatggatctataccatccacaaccatttgtagccctttttttacaaatggatctaaggcatcatctgttagctcagattctaaactcaaaagcccatctcttcttgttttaagtgatactcctttgaaatagtctatataccccttaagatcaatctctttctttttgaaagctattgataatactttcgggaatttcttcaatgttgaggaaggaaatgaaattcctacggcacctagtgttccaccaataactatcattgcagcagttggctgcagtaaagctatgggttttcccccttcaataataaagcctactataatacaaataaatgcaaatagtacacttaaaattgtcataatatccataaaattatcccccttgaatatatgaaattttagctcatatgtagcatttttcatactggttaatatatatttatgtaaatttgatacagtatatgaatttatatacttatataaaaataatagcatattataaaaaatatgtaaaataattatatatttaggggagaagtttatatatgaccgttaattcatacaaattaatctaataaatttcaggtgttaagtaattgtaaagtctaagttattatattataatgttgaaagaatatgctaaataggaagggatattgatttatggagaaaaatgtttttatagttgatgaaaaagatagaggagagcgaatcgataagtatttagctgaaatttttgttgataaatcaagatcttttatccaaggacttattgaaaaggatgatattaaggttaataataaaactcctaagagtaattataaactaagagctcttgatgaaatagaagtaacatttagcgagcctgaagtattaagagtagaggctgaagaaatacctattaatatactttatgaagataaagatgtagtagttgttaataaacctcaggggatggttgtgcatcctgcgccaggaaactataatggaacgttagttaatgctctgctttatcattgtaaagatttatctagcataaatggaattataagaccaggaatagttcacagaattgataaagatacatctggagttttggttgtagcaaaaaatgatgaagctcataataagctttcagatcaattaaaagatcactcaatgaagagagaatattatgctttagttgaaggaagactaaagaatgataaaggtataattgataaacctttggctagaaataagagagatagattgaagataggaattgtagagggaggcaaaagagctgtaacacattatgaagttttagaaagattcaatggctacacattgataaaatgtatattagaaactggaagaacacatcagataagagttcatatggcatctatcggatttccgttagttggtgatcctctttatggatttaagaaacaaagattcaaattgaaaggtcaagtgttacatgcgaagacattaggttttgttcatccaagcaaaaatgagtatatggaattcacaacagaactgccagaatactttcaagaaataatagaaaaattaagaaatgaagtaagataaaaatatggaggaataacatgaaattaaaatcagttttattagatgaaaaagctgttaatagaacactaataagaatttctcatgaaataattgaaagaaataaaggaatagacgaattagttttacttggaattaagactagagggtatccgcttgcaaaaagaattgctagctatataaaggggatagaaggggtagatgttccagttggatctgtagatataacattgtacagagatgatttaactaagataagtgaagatttagagattaagaatttagatttaggtcttgaaataaaagataaaaagataattataattgatgatgttttatatacatgtaggacagcaagagcagctatagatgcaattatggatgtaaatagacctagaggtattcaattagcagttcttatagacagagggcataaagaactaccaattagagcagattatgtgggtaaaaacattccaacttctaaaaatgaggttatagcagtatctctaaaagaaattgatggagaagattcagtgaaaatatttgataaatagataaaaagggagaatgcaaaaatatgtatgagttaattgcaacaagtactttcggaatagaaagcataactgcaaaagaattaagggcacttggttatgaagatttgaaaattgaaaacggaagagtaacttttgagggagacgaaatggatatagcgatttgcaatattcacttaagaactgcggatagagtacttataaaaatggcagaatttgaagctaaatctttcgaagaactttttcaagggaccaaaaaagtagaatggagtaagataattcctgaagacggagttatgcatgttgttggcaaaagtattaaatcaacgcttcatagcgttcctgactgccaatctatagttaaaaaagctgttgttaaaagtatgagtgaaagctatggaatagagacattcagcgaaagtggaccagtttataaaatagaagtagctatcttaaaagatatagttacgcttactatagatacaacaggaccaggattacataaaaggggttatagagaacttgctggagcagcaccattaaaagaaactttagcagcttcaatgcttctaatctcaagatggaatgacgggtttgaattaatagatccattttgtggttcggggacaattttaattgaagcggctatgatagctcaaaatattgcaccaggagtaaacagaagttttgtatgtgaaacatggccttcaattactaaagatatatttgattcagtaagagaaggtgcaaagaaatctgaaaagaataaggatataaaactaataggatacgatatagactatagagttcttaaagttgctatggaaaatgcaaaaaaagcaggagttgataaatatatacaatttcaaaagagagattttatggaattttcaacttcaagaaagtatggatttataatttcaaatccaccatatggagaaagaatcggtgagaaggaaatattacctacactatataaacatatgggaaatgcaaagaaaaagctggaagattgggattttaacatattaacatctttcgagccatttgaaaaaacatttggattaaaatcaacaaagaatagaaaattatacaatggaaaaataaaatgttattattatcaatattttcacaatgataaaattaaaaatgctggtgatatattaataaatgagttaataaagtaaagtttaaggcatcagaaagatttgaaaacatatttacaaagttttcttaaagtgataaaataaatttaaataaaatttgatagcaaaggcgctaacaatcagttggaattgttagcgtctttttttgttaaagagtttctgcatatgataattgaaataaaaatatataagatatacaagtttcaataacaaatttaaatttagaaatttaataatctaaatttttagttacaagtaaaatgtagagaatcaattgtaatatgcatattagaaattaataatttgagaaatgagattgtaaagaacttgaaactagtagtcagatagatactcttaaattgccaaaagaaaggagtttaaactatgtcagaggtatatcaaaaaatggcagaaaaaataccgaatatgagcaaagcacaagaaaaaatagcaaaatatatattagcgcacccaaatagtacgccttttctaactgttgaaaagttagctaaattatcaggagtaagcatagcaactgtcacgaggtttgtgatttttttgggatacaaaggttatcctgaatttttaagagatactcaagaatccatgcaacagcaagtatctaaagctaagcgtataaggattgattctgattcaagtgatagtgaagaaagagatatttataacatatttgaagatgacgtaaataatattaagctgacaatggaggacttaaatatatatgaattaagaaagtctgttaatttgctattaaatgcaaaaagaatatatatagtagcaagaagaagttctgctgtactcggaatgtttttaaaatattatctggatttaatgtttaataacgtaaatttaattgagcatatagagcaaattccaaagcagattagtggagttaataatgaagatgtaattatagggattacctttgagaaatatgcaagaagtacagtagaaatttttacacatctaaaaagaaaaggagctacaacaatatcaataactgacagtatgttgtctccgcttgttccatattctgatataacgctaacagctataagcaagggaacaaggtttatagaatcttttgctgcaccattgagcctgattaatgctttgattgcatctattgaaaaagaaaagaaagacttttttaatagtaatgtagaattgctagaggaagcgtgtagaaagtttgatttgttcatttaaatctaaaaatattatatgtttactaaaaaagagatatatcctaggattaagatatatctctttttcagtagattatgaattaaatatgttattaaagtcagcaggggttacaattagagttttattagtatggtaaattaccattccaggttttgccccattaggcttttttaattctttaacttttgtgtaatcaataggtaattttaatgaatcttttcctttgctataataacctgcgattatagctgcttcctcaagagttttgtctggtacatcaaaagagcaaactataacatgagatccaggaatatcttttgcatggagccacagatagtttttatttgcaaattttaaacttagataatcattttgcagattgttcttaccaacataaatatcaattccatcgcttgaaacaaagtgattaggcttagaagtctttaccttttttgaattcttgttgttttttctaaatcttatatatccagtttcaataagttcgttttttatttcatcaatttcattatagctttcagcatttagaatattagtaagtacagaatttaaatatttcatttcttcatcatttttcttgagttgaactttagcgtattcctcagatgtctttaacttattatattttttataataatactgaatattttcagcaggtgttttggttttgtttaaagagatagtaatatattcttcttgattttcgttataaaaatttagtagagtacattcgctatcacctttttttatactataaatatatgaagttaaaagatcaccttttattctaaatgattctttttcatcgcactcactaagagtttcattaagtatttttaattttttattacatctatcgatatttgtatgaataagcttttgtaagtcagtagatttattttgtaatctatcttgtttatctttcttctcataaaaggcatccattaatatattaggatcatcatatgaaattgataaataatcttcatttagtgaatttaattttagagaataaaaatcttttacaattcctaatttatttgtatacatattgtaagagatattttgatttaaatcataaatgaatttattaaaattttcataaatttcacttattgtaggtgaattattatgatttgtaatgttataatataaatcattagacaatagattacttattcctgtgaaacaattaaaataaaatttattatcaaaaacaatagaatttttgtttacaaaagtggatagttcttctaaagtaatagaaaaaggatttaacttagtagaagatgggggataaataaaattaacaccaggatataatactctataactatttatatcagcagttatatgttttattgattccataactttattatctctatttctaacaagtgtgatattagagtgtcgtcccataatttcaactataagagaatataaactatcaaatcctagttcgtctctattttcaatttctattattaagattctatcgttatctttttgagtaacatttgtaattctaccacctagtatatattttctaagaaccattaaatacataggagctttaataggattctctttcgtgctatttgttaaatgtattctggcaaacctaggggatgctgaaattaaaagtttgatattctgacgatcttttcttagagtcagaataatttcatctttttcaggttgatttatcttatctattttggaatttaatattgatttttctaaattatttactaaactatataggtagataccatctaatgccattttatgtcatcctttcttagtgtaactataaatagtataacattataggcatataattatcaattaatagcaaaaatgagaagaagggtgaatcaaattcatacatagatgttatattgatgtattataatatagttttaatattgtaatcctaattgagtttttggattgctaaaataccaaatgtaaacttatattaaaaaattatatattataaatgtaaaattagaataatagaatgaaaaaagatctaaatattataaaaaaattagaaaaagtatatagaaaaatttttaaataagttataatttaaacttggtgatattattaatgattaaatacaaaagtttaatattaaatagttgaagcttatgaaattatataattattaattataagaaatacagttattcagtagggggaatttaaatgaacttttataaaatgcaaggagcaggaaatgatttcgtatttattgaggatttcgataataagattaaagatgaatgcttattagcaaaaaaactttgtgacagacattttggaattggtgcagatggtcttgtgattgtcagaaaatcagagttagctcatgctagaatggttataataaatgccgatggttcaagagccaatatgtgtggaaatgctataagatgttttgggaaatatgtttatgaacataaaatagctacaggtgataaattttcagttgaaactggtgatggaattaaagagattgaaataatattagaaaatgaaaatgttaagtatgtaagagtttatatggggaatccatcttataacggatgtgatatacctttgaataatttggaaagtcttatagaaaaagaaattgcagtagatgataaaaagtataagatgactacgttgctccttggagttcctcatacaataattttcgaaagtgatagagaatacaatgttattcaagagggatcaaagatagaaaaattggatatttttagtgaaggaagtaatgtgaattttgtgaaaattgttgatgatacccatataagagttaatacatgggagagaggtgctggagctacgttagcttgtggaacaggatgcagtgcttcagtagtagttgctaagaagttgggacttgttaataaggataaagaaatttttgttaaagctcctggaggagagttaatcatagaagttttaggtcaagatgtttatatgaaaggtcctgcagaagtggttttcaagggtgaactttctttataaaattataaaaaacgaggaaacaaaaaatgaattcattagtaagaaagtgcttaagcatttttgctttcattgcaattccactgtttgtcttaggatgtgcatctaaaaaagaagatgtacctaatgtgacagaggatatcaagttaaatataggagctgttctaaaaagcgaagacggtaattataaactatataattatgacaatggtaagtatgtggagacaaaggaaaataaggttatcatagattatgataaaagtagttctaattatatatatgtagatagtggtaaaaattatgtggttaatagcggaaatagatatgaaatccaagatgagaattatagtggattaaaattatcaaaaggtggaaattatatatcttactttatagatgataatgggcttaagttaaaaatatttaatacaaatggaaataaagaaattgaaatgaaatctaatgtttcaatatcgggaacattatatgattggtatgatacagatacattggtttattatggagtaagcaatgatggcgttaatggattatttacttataatataaaagaaaataaagaagagttactttataagattaatgaaggctatttagcatttataaaatcaagagatgacgatgtagtatttttacaattaacactggaaaataaaagagaagtaatgatgataaacaaaaaaacaaaggatgttaagcttttgacagataatatagaagagatttcagatataattataaataaagataaattgtattttacaggaaaagcgtataataatgttaattctttatatgaattgatagataataaggtaaaaagattagtctttgattttccgggtactgtaaaaatagaaaaaggattagaggtaagtgaaaatggagatgttttatttataggttctagtaatggagatctcaagaaagagcaaatttatacatacactcaagatggtagcataagtgaaatagggaatagttcatcagaatatgtttttttagcatatacgcagtaatttaaatttagaattctttatcatgtttttatatgatggaggattctttattaatataaaaaagtattgactcttaccttaggtaggagtatatgctattcttatcataaaaataataatatacatattgcaaaaataattcttcatcataattctaaaaatattaaaagaattttagctgtaattgtgaattatgaaatatgcattgcgaattgcaacatatatattaaaaaaggagatagtagaatggatctaaaattacaatataactgtagtaatatagattgggaagaggtatctagtatactagaaaaagtagggatgagtcattatgaaggcgaaatacataagaaagcatttgaaaatagttatgctgttgtatttgcttttgataatgataagttgattggttttggacgagcaatctctgatggagtttatcaatctgcaatttatgatatagctgtgctacctgaatatcaaggtaagagtataggaagtaagattgttaataaaatcttagaatgcgttcctacatgtaatgctatattatatgcttcacctggaaaagaaaaattttatgaaaaattaaattttaaaaagatgaaaacaggaatggcttttttcagaaattcaattaaaatgcaaatgaaaggttttatagaataataaaagaataagtaagagttaatagataaactaaagctttaaagataataatatctttagaatttaaaattgtgatataggagcgtagaaaatgaataaatttgataaagctattaaccaaaagacgagtgaattaataacaaagaacttacttgggcaagaagttaatgaagaagagtttagaaaatttaaaattattgctagagcaattgttagagaagaaatgaggggagttaagccaaataaaaatcctaagtcattgtatggtaaaacatggaaagctgcaagaaaatatagtgatgttaagaaataaaaagtatgtattagaatttgattcgttaagttatcatgaaatcctaggcattttaattaatgtctaggatttttaatttaaaagtttagtaatttctattatttaggcgataaaaaaagattacattatttggaatgtaatgaataattactgagattttggttcaaaatttaaaatagaaactaaaaaatataaaattagataggtgtgtttaaaattaaggaatatgaaattgaagatgtagatttaggaactgctaaaaatttaaaaaaagaaatttgtgagaagtatagagttattccaataaaggaaaaattggacgaggtaatagttttgtcatatggagtaactgaagaagcaaaagaatatctaagatttatatataacaaaaacatagttatcaaggaaatcgaagagagaaattacgaaagcttaaaaaatataatatttggtatagatgacaaatcattagaagaaatattgataactaatgcaataaaggttaatgccagcgacattcacatagaacctcaaaatggttgtgtttatgtacgatatagaattaacggtagtttagttttggtgcacaaaatagattctgatgaatatataactcttgcatcgaagatcaagctgaaagctaatatggacataactgaaaaaagaagacctcaagatggaaaaataatagttaattataataatctaaaatacgatttaagagtatcttcaatacctgtagtatacggagaaaaattagtaattagaatattatattgtgataactttgactataatcttgaggacttaggattttcagaaagtcaaattaaactaattagaaaaataatatctttgaagaatggacttatattaattagcggcccaactggttcgtgaataaaagtgcaacaaaagaggatcgttagtaatctcttttatgaaggtattatagcgtttttttttacttccaccagaacctataggatatatttctagtagctcagtttcagcatcatatattatttcttcgattaaaaaatttataatccttcttttactttcaatagattcattttttatgtttacgcatttatctaatactgcatttatgaattcaatatcataaagctcagaagaattattttctatattttctcctatggatttcaagttttcttctagttgagaaatctcagtttttagtgatcttattttattcatgaaaatatctagtaaatcatcagctacagataatttatcaagtaatccattcaactgttttgttttatttgctagttgcttttctagagttgattttttcagtttatcttcttttaactttttattttcttttttagactttagtattctgtctaaaaaggcttgtttatttttagccatttctactaagctatctaatacgcactcatctactttgtctccaattaaatttttactattacagagatggccactgctacgcctttttaaattacatctataataaactttacataatccggtttcattaagtctacggccaagtgttattcccattgagcttccacagcatttacactttaatttgctagtaagtaaagcattattagtcttaccaaggttaggggatagagcactattggtcttaagctgcttttgagtttttagccaagtgtcaggatcaataaatccttcgcatcttttacttactgcagcaatccattcggacttatctttaaaaggggtcgtttttttaccatccctagctatcacagatgttttattgtactctaagattccatgaataccatcaggagatccaaaaacattaataccgtcatcttcaagatattttagaatttcgtctgaacttttagcataaagaggatttttcaaaattttatgcattgtagaggttgcgaaaagtttacccgaaggggcacatataccattgttcattaaatatctttcggtttggtgtatagatccaagccttaaatatgtgtcataaagcagctttactaattttacttcatcaggttcttgaactaaaaatgagattgctttttcattgccattttcgtcataacaagtttctctttttctagaatatccaagagggggagaaccgcccaaccattgcccgttttttgcaagctctatcatattatcccttacacgttctgcgatcgtctcacgctctaattgggcaaatacagaggcaatataaatcatagctcgtcccattggacttgtagtgtcaaattgttctcttatacttacaaagtcaactccatagacctgaagttcatcaagagtagaagagaagtcagcaacattacgagagatacgatctagcctataacatattaaaacattaaatttctctttttttatatcatttagtagcttttgaaattcaggtctattagtattcttccctgaaaacccttcatcttcataaattgaatactcaatctttttatttttatatagattttctatgtagtctttacacatttgaatttgattaccaatggaatcacctttgcctgtgtatttggattttcttgagtaaatagcaactttcatatttatcactcctaagaatatatgtttgttttgttattaggaatattatagcattatttaataggatgtgcgaatgtatgtttgtaatgaatgtaagtatattaaccagtgaatattattaaaaaatcattaatatggaatttagtaaagttgaaatagttgcaaagttaggattagtgaggcaattataaacatattaatagaaatgcaatattcgctgctagtcaaataacacaaatagaaaaagcacattaggattatggcatgacgaaataaaaaatagagaagagcaaacatgtaggaaagttaaattttgcttaccggttatcattgtagttcagataaatttacttaatagcaaataatcacgaattgtgtaataataacagttatagtttttattgacatattgctgtataaaaatgataataatatatatttatgtaaaatatggggggataatgcttgaataacttaaaattaaaaatcatttcgtgcacattgagcttttttatgtttttttcactatgtggaactagtgtaaatgcaatagaatatgcatcatcagcaagtaatgaaatagcaacaacaaattcacaaataacaaaaaatgctgcggtggatgtaactacaagctcagaagcagtacagaattcattagcagaagtaacaacaggagcagcagtgacagtagacatgcaggcgccaacagtgcctaccaagttagtggcttcatcaataacaagtacaagttgtatattatcttggacagcgtcaacagacaatgtaggagttacggaatatgatatatatagtggaacaacgaaaataggatctactacaggagaaacaacatttgaagtaacaggattaatgccaaatacatcatatagttttacgatagcagcaaaggatttagctggaaatgcatctgaagcgagtggtgcattgagtgtcacaactattatgaatacagaagtaacaacaggatcagcagtgacagtagacatgcaggcaccaacagtgcctaccaatttagtgtcttcatcaataacaagtacaagttgtatattatcttggacagcatcgacagataatataggagttactgaatatgatatatataatggaacaacgaaaataggttccacaacaggagaaacaacatatgatgtaacaggattaatgccaaatacatcatatagttttacgatagtagcaaaggatttagctggaaatacatctgaagtgagcagtatattaacaataaaaacattatcatcatctattataataagctcagatttaaaacttacaaaagatatcgaatatcaagatgttgaaattacaagtggagaagttgatctgaacggtcatacaatgactatcaatggaaacttgatacaatcaaacggagaggtaaatatagatggtggtcaattaattgtaaatggagactatagattgcaaacaaaaagcaattcaaatggtacagtaagttatgattatggatccggttatttaacaatgaataaagcctcagattatgtactagttaatggtaattttatagaccaatcacggtatagtggaactttgacggcagggatacttgaagttaaaggcgatttctatgagaaggtttattatacatattggggagattatgatggtaatttttctgcaagtggaagccataaagtaatattaagcgggactggaactcaaacagtaagctttgacaatcgaggaaaatctcattttaatatattggaaataagttcatcagcaaactcaataaaatttgctacagcgattccattaaataaatttgagggagatagtaaaaaggtatctaatttaaatctttatttttgtgcaccattaagtagtgatctgacaatagaaaatgatttaatattgtcaaatggattagatttaaatgggcacgtgcttacagttaataatctggtaatatctggtggtactatgcaattaaatgaaaacaatgttaatattaacggatattttattattaatggaggaacggtgaatttaattggagattcacatattaacggagatttaaacattaatggtggagaagttgatctgaaaggtcatacaatgactatcaatggaaacttgatacaatcaaacggagaggtaaatatagatggtggtcaattaattgtaaatggagactatagattgcaaacaaaaagcaattcaaatggtacagtaagttatgattatggatccggttatttaacaatgaataaagcctcagattatgtactagttaatggtaattttatagaccaatcacggtatagtggaactttgacggcagggacacttgaagttaaaggcgatttctatgagaaggtttattatacatattggggagattatgatggtaatttttctgcaagtggaagccataaagtaatattaagcgggactggaactcaaacagtaagctttgacaatcgaggaaaatctcattttaatatattggaaataagttcatcagcaaactcaataaaatttgctacagcgattccattaaataaatttgagggagatagtaaaaaggtatctaatttaaatctttatttttgtgcaccattaagtagtgatctgacaatagaaaatgatttaatattgtcaaatggattagatttaaatgggcacgtgcttacagttaataatctggtagtatctggtggtactatgcaattaaatgaaaacaatgttaatattaacggatattttattattaatggaggaacggtgaatttaattggagattcacatattaacggagatttaaacattaatggtggagaagttgatctgaacggtcatacaatgactatcaatggaaacttgatacaatcaaacggagaggtaaatatagatggtggtcaattaattgtaaatggagactatagattgcaaacaaaaagcaattcaaatggtacagtaagttatgattatggatccggttatttaacaatgaataaagcctcagattatgtactagttaatggtaattttatagaccaatcacggtatagtggaactttgacggcagggacacttgaagttaaaggcgatttctatgagaaggtttattatacatattggggagattatgatggtaatttttctgcaagtggaagccataaagtaatattaagcgggagcggaactcaaacagtaagctttgataatcgaggaaaatctcattttaatatattggaaataagttcatcagcaaactcaataaaatttgctacggcgattccattaaataaatttgagggggatagtaaaaaagtatctaatttaaatctttatttttgtgcaccattaagtagtgatctgacaatagaaaatgatttaatattgtcaaatgggctaaacttcaatggtggaaacctaaatatctctagaaatttagttatatcaggaggaactattgatttacatggtggaaatttaaatataaatggagatttaattatatcaggtggaacttttaacttggatggtggaaggacaaatgtaaatggaaatataacacaaccagggggagagctttatgtaaatggtggccaattaactgtgaatggagattatagaatacaagtaaaagacgacttaaatgggacagtatgtagtgaaggtagtttaaaaatggataatgcggcagactacatacttgtgaaaaagaattttgtcattcaatcatataatagtagtagctctttaacagcaggaacgcttgaggttaaaggagacttttatcagaagaagggttttcgctattatttttatggttctagttattgctataacaactttgtggcatcaggatcacataaagtaattttatatggaactgcaagttttgaaaatcctgattattcacattttaatatattggttaatggaaaaaccagtagcacttcagatagtgaaatagatttctattttgatttaaacacaggaacaataacaggatacagaggttcaggtacagaagtgattataccaaatacaattggtggggttaaggtaacacgaataggaagagaggcatttgaaggttgtgatcatataataagtataacaatcccagatagtgtaacaagtataggatatgatgcattttacaattgtagtagtttgaaaaatctgactataccaagcagtgtaaaaagtatagaatatggtgcatttggagggtgtagtagattgacaagcttaagtttttcagacggcttagcaagtataggggataaggctttttataattgcataagcttaatggatataagtattcctaatagtgtaacaagtatggaaggttcaccattttactattgtcgtgcaacatattatgtagaaaataaagcattaagagatctcttaattagccatggtgtaagtccatataaaataatattgcatggccaagttgtactagatgatattgatacaaatgattcaaattcagcaaatcaggcgcaaccaccactaacttatgttatttgtgttggatatggtggttccattggatgtggagttggagcgactggagcagcaggtgtagctaaagattcagatggaactgttgtaggtttaatttctgctggtggtggtggtacaactccagctgcaggagcaggatggcagatacaactcactaatgcaaaatcagttgaatcattaaaaggatgggggacatcagcaggtggatctgctacattttttggagttggtggagggatagattatgaaacgagcactaatcctgatggtactccatggtcaggtgttgtaatttctgtaggtgctaataacgttatagctccatttgagcttcatgcaaatgagtcatatacttgggaaattactgcacaagatgttgataaggtgaacaatgaaattaatagtaaaattgaatggttaaataataatttatcgaatgaagaaaagaaacaaattaataatataataggaggagccttattaactctttcgtaacataatatttacttaaagcataagtgaagttataaagaagaattataaattagactttataataaaggtatggtttagctgtacctttatgtagttaataaacaaagtagtatgcataatactatatattatatttattagagtagcttatgttaaatatatattaatataacgtgttgttccaattaaaatttaatataaataattttataaacctaatggaggttctaaaatgaatataataattattgttatagtgagtatagttctagtaattggtattcctcttagtatatcaaaggatattaaatataaagaaaagcataattttcaatgcacaaagtgttcatatgtatatgatattattgaaaatcaaagtaatagtttcagaattttaggaaagttgcacgtaaagtgtcctaagtgtggaaaatattccttagtgaaaattgtaaacaaagaatagttgatggaattgtagtaaaagataaattaaaaatagtaagctgttagtttaagatgaaagtataaaatatgatgcaaaattcttaatatacattaagaaagaaaaaataggctgtacaagatgtaaggaataaagttattgaaaaatggggatatggcggggatactttgtgaatatcacattaaaattaagtgaaattcaagatatataattatgtgttaaaatacggtgaaatggtcggtttaaagcatgtgattaaatttgaataaatatatataggcggtgtcccgctgcgagcacaatgagaatctacagttaattgaataagtaagccaggactttagtattatttgtgacaataatactgtattattactattataaatatcaaatgctaaaaacatctatagaaatataggtgtttttattatattagtggtttactttgcctttatgattagatgcataaaaagtagatgaaaatgtataaaaaagtaaatcattattttaattataatccaataatgttataataatcctatattccgtaaagatgggttacggtggttgtgcgttttccgccttgggctattagaaataatggtctaagggggtggtattagattgtgataattggaatgttaatattatcaataacactaactttagtgataatgattaatagagctttaaaaagcaattcaaaaagttgtgaattcaacttagagattaacataaagggttttaaagtaaattttaagacaaaagaaaaggaccctcccatcaagtaaagtccttttctaacccaaaataacatctaatagccctaaaattaaaaacgttctagggaaagttagtgttacagcactaacttttcttatttatattatatcaaatatttaaagaaaataaacatcaattttcataaattaattaatgaaaagagtttaaaataatttagaatttccaaatttgtaataacgcattattcgaaaacggattaatagtattttgttactttatggataagcataagtgagtatgttattatataggcaataattatttatctacatgttgtatatctaaaattcataaattattaaaagagggaaaataatatgtataaaaataatggaattgtttttgatgaacatttttcaaatgctttaataaaatcagcagcgaaaaatggatatgttgaatttaacacaggtagtgacttagatagacagttggtgaaatctttgatgactaatagggagtatggcttgttgcgacaaaaatgctttgagttagccttactatatgatgaagtatatttaaatgatccgtttgaattagcatcactagataggttgcagaaagaaggtatagttaaaaaacataaatattggaataatacattacaagataatagtattaatgagatttcattagcgcaagatatcaagccattggtaatagattatattattaaacattttaaaaagagaaggccatatttaaatgggataagagggttagcgaataaatatgtggatggactatatgatttcgaagttttatggagagctgggcttaaacaagaagctatcgaaaatactcatatacctttaaaaaagctattgaaaattaaaggcgatccggtaaatttcatatgtaatctttttgatgaaacaaatggtattcatagttttgcagttgatatgattgatattgcgtttgaaattgaatcaattatttctttgatgaaaatatctaatgaatttaaagttccattcatttcaaaaagaatcacaggttttgaaaatgaattagagattgataaaacgtatgaggtatataaaacttgtataatagagatgaaaaatgaggtacaatatattccacaaatagactcaatagacgatttgttaagagtaagagaaaaatctgaaataaaaaggtttagagaggtactgaatgagtggacaagtttgatgagtgatcaggaatttaatttggcggaaaaaattagaaaggatatttttaaagctaacaaagaaattgcaaatttggataagtggagaaaagtagataagctaatttattatttatctattccaacaatgttaataccgtatttatctaatattataacaataggaggagcttatacgagatatcatattgaaggaaaagagaagagatatgggtggatagggattggacgctagaaaagattgtttgaattttttatcttaatattatttgtgtgggtttaaaggagaatttatatgttggataaaatacataatattgaggaacaactattaagagaaaataaacattatatatatgcaaatatgactagagaattctatcagaagtttatcaatataaaacagaagttaagtctagagtataattcttatgaaaaaattcaaaaattattgaaagtggcggagaataaccaattattaaataaagaatataaatgtataaagaaattagacaagtatgaatatgatttagagaaattatcgatatcaattataatttttgctgctttaacacttgaatcatatatatacgattatggtgcaaggaaattaggagatagtttcatgaaaaatcatttggataagcttgatccaataagtaaagttgttattatagttgaattggctacacaaaaaaagtttcctaaagatagaagagtatatggtcttataaaagaactaaataaatcacgaaattcgttggtacattataaatcttcaaaaaaaaatttagataacgtagcaagtgatttagttaagaatgatggagaacttatcgactttatgaaaaaagctgaccaagcatatcaagcattgatagaattagcaaatacaattgaaaatttggatcaatctgaaaatgtaaaatttgctcttggcatggatatttgatgtaataatgaaattagaaatgttttggtgaggaaaaacgcgatatgaataattggtgcccaacagaaaatgaagtgataaataaagccatagaaaaattagaaagcataggttttaatattataagccaatgtaatacgaaacaacaaggaatagatatagaagctgaaaagaatggaattaaattattaattgaagcaaaaggagcaactagctcaatggaaggctcaaaaagaaatggaaagccatttaatagaaatcaagcacgtactcatatatcagtagcaatttataaagtaatgagtttaatatctgaacttaaaaaccacaatagcttaaccttatttggcatttgtttgccttttgagagaaatcatatagaattcataaacaatgtaaaatattcactggataagcttggtgttgtaatattatgggttaaagaaaatgatgtcttaattgaggttaatagtgaagaggtaaaagaatatttttaaaatagaagtagcgaattaatttcgtaatatgcagtgctatcattgttttttattaaaaatgagttaaagtataatataatttagactagaaaaattatgggggaaataatcttggattacaaaaaaagagacaaggaagtaaaaaaacttaaagataagtataagtcagatactacattggttaggaaacgtgattatgaaaactttgtccagattaaagagtcaggaaaagaaggaaagtctaaattatttgaaaattatacatataggaataataagtggaaatgtgatccgataacatttgatgacaaagaatatatattttgctcttttatagaaagcaaatttggaaaaagtgcagtgctaagagaagaggatatgtatcatgttcaagtgaatttttggaatgtaacttttaataattgtaattttgaaaatatatattttgaagcatcaagattttggggatgtaaatttattaattgtaattttagtgaatttggagttgtatttgataattgtgtatttagaaatattgagatagagtatgatgaaaataaaaatgaacacgtcgatataaatgtgtcaactgagtttgagtcttgtacttttactagaactaggtttagaaatagcactacttctaacatgatctttgaaaacaatacatttattttatcaagttttacggattgtgagatggaagattgtatttttgatggaaatgctttttattcaacaataataaataattcaaatatactcaacttaaatattataagaatagtgaatgctaatatagaatttcattttactaatcaggaaaaagacactaacttgcataaaagtatatatgtaagtaagattgataataaatatataacaaaaggaaaagatgattttaagattttagctaaaatgtattatacattaattaattatctccagagtaaaaacttagatacagataatatgagtgagtatagatttctatatagttattattcaatgttatcaaagcagagattaaatcaaatatgggatagaattagttggttaatttgcggatttggtgaaaagatagaaagattgtttggttggtttatattttttatattagctccagcggctggatatatgatttctggaattaaggttggagaatcagtaataaactatgatgttattggaggtaccccagtaggactggacaagtggatggaggactttggcatgtgtttacattttagtatagtaactttttctacagtaggatatggaaatataattcctgatggtcttggaagctatataatttctgcatcccaaatactaattggaattttattcatagcaacacttacatctgttactattaagaaaatcctaaaataatattttaataccacaatattcagaaatgaatttgtggtatttttgttattttatagaatttacttggtaaattgtgctacactaaaataggttttttataattagtataagtatttaagtagatattttaaagttagaaattggtaagctaataataattatttatagagggagaggatttgatgaataaatcttatataaatttattgaaaaaaaatgtagaagataataattatgaagaaagcataaagactctgttaaatatgtataaagaggataaaataaattttagaaaaaaaatattattttcagaaatattatgttctcctacaaaaattgttggctatgatagcaaaaacaatgaaaagctgcagaaaattatatgcaaaatgattgaattaggtgcggaacataaattttcggaagaaataatagatttttcacatctattatcagagttatatgatattgagaaaactatagcgataatacgtaataattataaaaataatttaaaagtgattgaaacaaataaattttataattatcctatacataagcaattgatattactatgctacatatttgaaactcagataaatattatggaggaaaagttacaagaaatatatgaggaaaaaacaattacaggatatgaaggacaattagatatattaaaaactaaagaaggtgcaattaaatctttagagggaagtgctgaacagtatattgaaatactagacaacgtaatagaatatttatatcgcttggcaggagataaaattgaaagctttgataataatactctaaacgatattaattcttatgtagaagaagaattagaaaaatacttaaagttaattggggcacaaaatttcttgcaaaatatttgggaaaggtttaaatatgaagattttttgttagagtcaaaagcagatgaagataaatatgtgtttaagcctaaagatacaaaagctttctgtgttgaaagaatagctatagaaagagcgaatgcattagagaatagccttgttaataatattattatagaaaatagtgaagaaataatttctagcaatgaagaaataaaacagttcgcaattaaaatgaatactttttcagatatatttaaaatggataaaaattattatttgaaagttaacatatttgataaaatgagtgtagaaatattgaaagaaaacattatagatgaatcatatcatcatatagttagtaatacaaattctaagataaaaatgcaagatgtttttaatgttataatataccttaaaacgatagctagagttttccatgaatttaaaaaaatacaaagtaaaaaaggtaagaatgatatctttgatgagattgctattttagcattagaagatattattaatcattatgctagaataaatgaaaatagtaatatagttgttgcaagagatttaatcgatatttttgtttataaaccatcagaaaagattaaaagtaatcagagcggtaataataaaaataaaagtttagatttgttttgtagacctttaatatattttggacaaggtaatatattattttctaatttatttatacgacagattaatgtttgcagagttgtagaagaaattaaaattaaatggggaaaaaatatagctgaaaagggatttaaatttaataaagatttaattaatttattaagtttaagtgaccatatacaagtaaataaaaaagaagtaaaatttatagccaatgatgggagagaaatagagtttgattttatcgccacttttgaggattatttgcttttaatagagattaaaaactttgagacaccttattcagtttatgagaggcataaattaagaaaagatgtaaaagggtgttcaaaacaagtattaagaagaataaattcagtacaaaatgaagaagattggaaagagattagaaaacaatgtgatataaaattaccgaaaatgccattcaaaaaagataaaattatatacttaaactgcttgagtgtattaaattttacgtcaatgattattaacgatgttttagttatagattcgaagtgcttactggaattttttttaaaaccttatgtagaagttaaaatcttcaacagcatttcaaaagctattgttcgtgaaaaaattataaaatcagaaaatgtgactgttaaagattttttagaatatataaagcttccaggcattattaaaaaatataaaaattgcttgaaatatggctataaaaaattacctagatttcatgagagcgataaaaatattgaattttatgatttatatatgactgaaagtcccgctgacacaatttataaaaagagttctatacaaaaaataattaatgaaaatataaaatttgagagaaatgaattatgtatatgtggaagcggtaagaaatacaaaagatgctgtgggaaatagagcagaaattagatatgaattcttgttttttatatatgatgccacaatattcagaaatgaatttgtggtatttttatcgttttatagaacttatattatagaacatgctacaataaaggtgtaataattaataaaattatgggggaaacgctttatggaaagaataagtaaagaaattattgaatccgaaataaatagagagtataaacccaatgcgtatcaagcagggtataaaaccttaccgttcaatgatcttagtgatagggactttgaaatattaatctatcaattaattagagagagaataaaaaactctcatgagataagatttgatgatatagccttaatgcaaggggtaggtgagcaaggaagagattgctgtttgtataaggatggtcaggttgccggagttgcacaatgtaaaaaatataaagaacgattaactaaaccaagtgttataaaagaaatactgaagtttttaatgtattcaatagtagataatacaatttttccagatgatatatcatgccttaattatttattatttgtatcaaatgattttacagggcctgcaattgaattattaagtaaattcaatactgaaatttataaagaagatcttgaaaaatattttattcaaataaaagaagattatgaatcatttaaagaacttgactttaaagaatgcgaggaatcaataaaagataaaattaatcggttacggctacaaaaatataattctatagatatagcttgtgatttggcattatatccagaaattataaaaaattatttttcgataatgagtatttcttcattgaaggatacagaagatgctttgcgtaatgtgcttaatgagtttggaatgaattttttaactgatgaaactctcaaagattttgagagtagaattaaaaatatacctaatgaaaatcgcattaaattaggggctgtagatttctatggttatgaacttgattattttttgaagaacaaagaacttgttttttcggtatttaaaaatatttttcatgaaaaagcacgcttagatcagcagattttggagtttttattagataagatacatactaaagttattgaagaaataacaaataaattattgtacaaaaataaaatacacccatttagtgtgcaaatagcatcaccttacataagcgcactttgttttgcttcgctttttaggacaatgatgccaattgatttatttaagagatcttttccgaatttagataagtcaagagatttgattcttaaagatatagaaagaaaaatttttaaagagtatgaacaaattatatctaaaaatcatcttaacatggaagaaggagctgatctaataacaataaaggaaatatataataaagataaaatagttcttataccaatacttgataagatttcagatgaattaattagtaaaattaaaacaactacaattactataaaagatatgaattttttagacaatactgattatatggaaaaacttattgaaactgcaaagaaattcgatagtatacaataatttatataaagacaacaaaaataccacattatttagcaatgaatttgtggtatttttgttattttatagaattataatggtaaaatatgctacaataataccatatttgaaatgttatgtaactatatgttaaattcaggattacagacaaaacaggtaaataatttttattcaaatagggggattaagatgaactcactaaataatgaatgccaaggtattaaaacacaatattcattagtaaaacatttaaaattacattcagaatgtgatgaaaaatataaaaatttatatgctacttgggtgcaagatgaaaaggtttatacaaacgctttagccgctataactacaagttttccacattatagtatgcatgatgcaagtcattcctggagtatagtaaataaaatagaaatggtattaggagaagcaagaattaagcaattatctccaacggatacgtttctaattctagaaacagcatttgtgcatgatttaggaatgattatttgtgaagaagagcaaaaaaaattgtggttggatatagaatttaaaaaatatattgaagatattattaataataattatgataaagatttggtttcagcagcaaattatatcaggaatatagagaaaaatgtcgtggaggatagtaaagtttggccaatagaagtaaaaaaatatgttactatacttaatgctgattttttcaggagaaaacataattatagaagtgccgaggtaattattcattcttctaaaataggtgttttgcaaaatcgtaataatttaatacaagaaagaataatgagattgatagctcaaatttctattatgcatgtaacggattttagtgatatattaaataaattgtatcaagtagaaaatggggttagcacagatgaaattcatcctagaatgatagcttgtttattgagattaggagatttattggatttggataatggaagatttagtgaggtattatcaaatacgatttatatgcctaaatcatcgcaagaacataaggaaaagcatcaggctattacgcactttttagtttcaccagaaagaatagaagttgctgcgatatgtcccgatgatagcgtttatagagcaacgcgtcaatggtttgaatggttgcaagaagaattaaagaatttaagtagtagatggtctgatatagtaccgtacgatttcatcggtggaccaccaagcttgggagacataaagttaagcataagagatggccatggaataacagaacaattgaattacaaatttagtatagatcagaaaatagcatttgaattcattgaaggttctggaatatatgaaaataaattagattgtataagagagattattcagaatgcattagatgcaaccaaacttcaaatttggaatgatattgaaattggaaaatataagtcattaatagaatacgaagatatagaatgtatgttagcatttagcagcaatattccagaaataataagaaatttatacccaattacaatcactctagaatacattgaggattcaaaaggagaaacagaaaatgatgagtttataataatggttgaagattgtggatgtggcattagtaaacaagatttaaagagggtagaatcagtaggacatagttggaatggtgaaatagaaaagtataaaattataaataggatgccagaatggatgaggcctacgggagactttggaatagggttacattcaatttttatgattaccgatgaagttgaaattgagacaaaagcagaagatagtgaagcatataatttcacatttgtttcgagtaaaaacaatggctatataagtactaaaattaataaaaataggaaaaggaatggcacaaaaataagttttaaattcaaaagtaaatttattgaagaatttgaatctacgatagacagtgctgttcatgatgaattaaaagatatagatagaaatttggatttagttgataataagtataaatctaagagaaataaaaaaagaatgtgtgcgctattgaacagttatttaaataatattgattggataaagattgaaaaatgtggcattttaactgaagaaggttatgtacctgataaaatgtttaataatgaagaaattaatgtttttaccacaaatagcaaagatggagatttagaaataagtgttaagcttgataaccatgaaggtttatcagcatatgttaaagataataaaacgtattcggaaataaattttcattttattagactaactccatatgataatagaagtaaatcatataaatttactagaatgtcaaatacttcgggatatgggctgttttcagacaaatctgaaatatattttaaagacatattttgcacaaaggtatcagaaattcatgtatttaaaactaaggtaaatattgtagaaggtaaagctaaagagcttttaagtataaatagaaatagaattaagaatagatctattcttaataaatatattaatagaataaacgattatatattaaagaaagtaatattttgcatgtggaagcatgtcactgatatagaagctgaatttaaatttaatgatcaaaatagtatggatatggttatattaacgttatattataataaatattatgataaatctaattttgagatcataaaaaataacgtagttttcaataaatgggggattagagagtcatataaaattaataaagatggtatttgggaagaaaacattacattaaaggaattaatttctaaggataaagtcataatagcagatttctgtaatgaaaatattaaagcaaaagctgtagaatacaatatagatacaatactagaatcagttgaatatatagatatagaactattagggtatgatacgatagagtttattgattctgcttgttatatagctcataaaaatactaatttcaaaggagattatattaatactatagttgattataataataaaaaattgcttaaaattttactaaatgatttatatgataaacaacaattgattacaagaattagaactaaaatcaatggatttaagtataaaaataaggagaattctagtattatctatttagttgaccttgaatatcaaatattatctccattcactagtgacatgaaagaagagatatttaagaaaaacattgatcaaataattaatgatttaaagaaaaattataaatttgatgaattaattgaatatgtatataataattcattgcacaaagaatttcttcagaatgagagatataaagaaattattgaaaatgcatataaggaattaatattagattatattaattatgcttatagtgaatataaatatgataatgacgatcaagaagctgcaatagatttaaataatataaaaaaaaggaattaaatataaattattgaaattaattaagcataattagttaaaaaactataatataaattaaatttcactttaaaggtagaagatgacaagcaataaatcacttgagaattctatttttctcaattaaagatataaaagtcatttctcaactgttgtatcattttatacagaatatttacgaacatatgtttgcacaaaagcgaatattattgtaaaatggtattaacatttgtagggagatgaagctatggaaacaaaagtaagtgaattgttgttgaaaggattaaaaattaattttagttataaggaactacaagagctattgaaccgaatttctatagtaaaaaatgaatatgtatctttatgtaataaaaaaaatcaggatgaactttaatcatcttgattttttttattttgagctaatgttattttagctgccaaaattaaattaggtagatctttttcttcaattttatatccatctttctcaagctctttaataagttttagaccgacttgctctgctaaattgcccgttggctctacgcttgaagtgatgatatcatttctacctagaaggtaatcagtagaaacattaagaacattggctaatttagaaatgatttcacctttgggttctctttttccgttctcgtatctagacaaagttgcctcagtaattccggctaactcagcaagttctttttgctttaaatttctttcttctcgaagaatttgtatcttttcaccaatagttttcatagtattacctccaatataacttaccattattataaatcaaatgaaatcaagttaaaaaaaacttaccaaatttacaaattatatattgacacttaccaaatggtaatgtattattaaattaccgaatggtaaggaggtgattacaattaaagctaatttactaaaaggaaaaagagccttaaatggtttaacacaaaagaatatagctgagatgataggcgtatctgagaaaacttataaccataaggaagctgggaaaattaaatttaaagttgatgaaataatattactaagttcggtgtttaatttaaatataagtgagattaacaaaattttttttaataacaagttaccaaatgtataagttaatggatatctaaattataatttaccaataatataaaaacaattgacattcattcactaaagaaaagaaaaataagcaatttcaatacttacaaaaagagaaattatggaagaggactaagttaaagaaaagtagagaaaggagaataaatgaatagcaaagcaataaacaagaatgacacgatttatagacaagcaagaaaaagagcagcagaattcaatgaaaaatttaaaagcattgagggcgctagtgaagcaataggagttagtaaggatcaactatctaattatgagttaggtttatataaacagttgccagtagattcggttgtaagaatggcagatgcttataatgcaccagaattaatgaattattattgctgcaatgaatgtgtgatagggaaacttacgatgtcaccagttgagatttgtagtattgaaagattaactattcagatactagcagttttaaatggtacaagcataaacaaaataaaagaatcgctaattgatataactgcagatggaaagattacaaaagacgagcttccaaggttacaagaaataataaatacattagatgaaatttcagctaaatcacagtctttaaaattgtgggctgagaaatatttaataaattgttgtaggagtgatgtttaatgaaagcagtttggcattttaataatgaagaacatgagaaagaaattaaggggaaattattggacatgcttgttgaggatgcaataaatatttatcctatcgagcaaattgatgcaatgatcagatttggaaaggaaggaaaattaaatttaaagtgatggggagtgaaagaatgttttatttattcttagatgtactaagatcacaaactacaaaagaagaatttactgaaatagttactatgacagatgatgatattaaatttaatagagtttattttggaaagacaactaacttaaaacaatatattagaatttgtactttatgcactaaggcgttttcaagaacagtaacaaagagtatgaaggaaatcttagattcactagatagaatagttgatgcaacttttgaaagaagtgataaaggaacctataaatcattgggagagatattatcagaagaagttaaaaaagcaagaaatcaggaggggaattatgcaaagcatattaattaaaaagttaataattaagaattttaaaggcgtaaaagcgttggaagttgactttggaaatataaccaatattttaggtggaaatgccacaggaaagacaacaatatttgatagcttttgttggttgttatttggaaaggatagtaaggatagaaaagactttgagataaaaacattagattctaatggacaagcgatacatggcttagaacatagtgtgactggaatcttagaagtaaatggagaagaaatagaacttcaaagaatactaatggaaaaatggacaaagaaaaaaggacttgcagataaagttttttcaggtcacgaaacaacttactatatcaatcaagtccctgccaaacaaaaagaatataacgaaaaggtagattatatcttgccggatacaacctttaagttaatttctaatccactttattttaacagcatagagtggaaaaagcaaagggaaatattattagaaatcatcggagatatagagcaaagcaacgtaattaactacaaaaaagaattaaaaccattagagcagttattatcaaataatacacagcttgaggacttcagaaagaaagtaaaagctcaaatatctaaatataacaaggataaagaatcaattccttttagaattgatgaatgcaataactcaatagtagaagatgattttaaaattttagaatctagaagaacaacaattcaaggaggaataaatgctttagctaaacaaatagcagcaggtgataatagcactgaaagaatgaaattagaaaaggaactagcggacttgaagcttgaatatagcactaaatttacaaaagctaaagaaaacgtaaatgaaccgctagatgaattaaatataaagatatcagataaaaagtatgaaataagtgatcttgaacataagattcaaattttaaatagagataaggtagatgttgaagaagcaataaaaaatgctgattcagctattataaaacataaagagaaacagcaatctttgagagaagagtggaagcaagagtttagtacaatatttgaatttgatgaagatgagaagttttgtccaacttgccatagagaatatgaaagtgaacagatagaagatattaaggataatgcagagagatactttgatgagataaagacaaagaagcttaattcaataaacaaacaaggtaaagaactcggagaaaagataaaagaacttgaagctttaactgaagataataatttaaaaatagcaaattatacagaaaagctagatgaatatagcttaaatataactcaacttaaaactgaattagaacagctagagattcagaaacaaagcctaaatactgataagacaataacatttgagggtgaacaagaattggtccaagccataaatgaattaaaaagtaggattgaagaatttaaattaactgatactacagaacttacaaacagaaaattaaacctagaaaaagaactggagaatataaataaaaggcttggacagatagaaattaatgaaactcttagaaatagaattcaagagctccaggaggaagaaagaaatatagcaaatgaaattgcaaaactagaaggatatgacttcttatgtgaagagttcataagaacaaaggttgaactactagaggagagaataaattctaaatttaaaacagtaagatttaaattatttgaacaacaaataaatggaggactcaatgaatgctgtgaagctttaatcgatggagtgccattctcaaatgctaatacagcaagtcagataaacgcgggaatagagattataaatacactatcagaattttatggagtaactgctccgatatttattgacaatagagaaagtgttaatgagatagttccaacagagagccaattaattaacttaatagtaagcaaagataagaaattaaaaatagagaatgaaaaagagcaggaagttgcttaatgaactcgattgaaaaatcaaaaatctttattaaatatggagcgtgaataaaaatgaatgatagattattagcaatattagattatttatctgactttaatacagaaaagtctaagtgtatgactacacctgaggaaagaaaaaagcagaaagaaaaagctgcagagatttacaagattctagtaaatgaaatagtagatttgttcgtagattcaagagttatagaggaaactacaaaagccaatgaggataacaaaatgaaggaaaatagttttgaagaattttttaaagcattttcagataatccaggtataaaggtaacaattgtacatgatcttataaaacctaaatgggcactccaagaagttagtatgagtgatgttatgtatgcactaggctataaccttgattctcaagatataaataaagtattgaaagaagcaagagtttatataaaggaggaaaagtaatggctgaaacaggattagttttaagtaaagaagatgcatttaataatgttatggctaagatagccgcactagaaaaaaataatggtattaagttacctaagaattattcagcagaaaatgcaattaattcagcctggttgatgcttcaggaagtagtagataaagagaaaaagcaggcacttgaagtatgcacaaaaacttcgatagttgaagctttatacaacatggtattgcaaggattaagcccttccaaaagacaatgttattttatagtacacggaagcaaattaactcttatgaaaagctatatgggaagtatagttgcaacaaaaagattaagtggaataaaagatgtaaaagcctttgtgatatatgaaggtgatgtatttgaaacagtattcaataatgaaacatatactattgaatttaactatcagccaaagtttgaaaatataaattcaaataagataaaaggtgcatttgcattaataataggtgatgataataagttactgcatacggagataatgacaatagatcaaataagaaagtcatgggggatgggtatagcttataaaagtggaaaatcaaatacacataatgactttggagaagagatggcaaagaagagcgttataaatagggcttgtaagagattttataatacctcagatgatagtgatgtattaatagaaagcttaaataacacagatgaagattatgatgaagcagatattattgaaaatgctaaagaacaggtacatgaagaaattaaagctaatgcaaaccaagaagtaatagatgtagatccaaagcaagtaacagaaattgataataacaataacgaaaatccaattcaaaaagatttaaataataagaaaactgaaaaagcagaacagcaaatgatgtgtgaattttaatgattaaagtattagcatcaggaagtacaggaaactcttatatcattcaggcagaagaagaaattcttttgcttgaatgcggaataaatttcaaagaaattaaacaaggattggattttgatttaagtaaagtaaaaggttgcttgattacacatgagcataaagatcactcaaaagctataaaggatgtgctggctgctggaatagatatttatatgagtaaaggtacagcagcaggtattaatttagaggatgagagatatagctataggttcaattatttaaggcataaaatacctaaacatataggaggttttactataattccatttagtgtagagcatgatgtaaatgagccgctaggatttttaatatatcatcctaaaataggtaagattgtttttgcaacagatacgtattatttaaaaccagtatttaagaatgtaaatcatattttaatagaatgtaattattcagaagatatattgcctcaattgcctgcgtggagggctagaactattaaaagccatatgagcttagagacattaaaagaaacgctaaaatcgtgggaattaggcaatacaaaagatataacactaattcatataagcaacgataatggagatcctgaaagattcaaagaagaaatagagaatttcacaggaattaaaacatatgtagcagaaccaggattaataattaattaaaaggaataaataaaggcgggtgggcttatggcaagaccagtaaaagaaggcttatcttactttccttttgatgtagattttttctcagatagaaaaattaaaatattaaaatcaaggtacggagcagacgggattacattatatatgtatctcttatgcgaagtatataaaagtaacggatactatttagaaactgatgatgattttttatatatcatatcagacgatcttaacatgagttatgagaagattaggcagattatgaacttcttacttgaacggtcactgtttgacgatacacttttcaagtcggacaaggtcttaacctccatcggaatacaacgcagatttcaagaagctattaaatctagagcttctaaaaggactgtggaaatcacaaagttttggcttttagaaaaaaatgagactcaaagctttattaaagtgaacccaaatccaaataaatctgagaataactcgaataaatccgagaataacccaagtaaatctgagattaatgacacaaagaaaagtaaagtaaataaaaataaagtaaaagaaagtaaagtagataataatatattcttcgtttatgagaattgtggttttggtactattaataattttacaaaagaacaactagaagtattggtaaatgattttagttttgagtggactaaagaagctcttgaaatagcaactactaatggagctagaaatttaaaatatgttcaacgtgttttagagaattggagagataaaggaaaaaactatattcctacttacagtaaagataacgtcaaggttttaaagtttaacaactttgagcctagggaatatgactatgacaaattagagaaaaggttattggggtgggatgatgattgataaaaataatattattctaggtcaagtaagtatattcgatttagaatttgtaaagccccaaaaacctagggaaaagttaaagccagtatctataatcaaatctaagggaaatgacaataagtttactgagattattaacttatacagctctgctgcagcgagaatagttaaacaagtatgtggagtcttgctagtagaacttgaggataagacattatattttaatccagatggagtacaggaactagagctgaagaaagatatggagttaatgccggcagatgaaattctggttgtaaatcaggatagagatcttaattttatacagcttaaaaagttggaggacatgcgtgtaaatcaatatattaagcgtaaaggtgatgccaatataataataacatttcctgggaaaacaattgttataaatcaacgtggttgggtattggaatatcaccagaaacctagatatcacaataatgaactatttatcacagaaatggctaagaaaagcacagatttggctaacaatgttacggaaatagatagaaatattacaaaaagtgtgaacgaagatactgaatttaagaacgatgaaaatgaattaggaaatctacaggttggtgataaagttgaatttaattatgatggtcctcaggtaggtaatataactagcatttacaacaatggggaaacggtaaatatagtttggaaccataaacatacaggcttttattacaagtgtgttaagaaaatatcttagaaatgggagtgtgatatattatgacaccacaagaatggagagataaaacagtgagagatattgagttaaaaagaaaaaagagattagaagggcaaaagcaagctaaaaattttagttttgaaagtatgatgagagttcaaaggaggctgaataaataatgaataatgaattagaaatgcataaaatttttgagaagtattatgaattatcgagtattgagtggagaaaaacaattgttggatatgagccacttgataaaagtatagagcttccaagtggagcagataggaaaactgctattaaaatttcgtttaagaataaagattggataagagtttataggataggaaataaagttgagtggtactaagcaaaggagaattttatggctattacaaagtataaatcaaggaaagtaacagtggatggatatacatttgactcaatagatgagagtaaatattatcaggcattactaatgagaagagctaaagatgagattctaaattttgagatgcaacctaagtttgtattgatacctggttttaagaaacaaggaaagacttttaaggctatgacttatacaccagattttttaatataccacatcgatggatcagaagagttaatagatattaagggattttcaacgcagcagggagaattaaggtacaagctatttaattatttctataaagacacgaaattaacctggctagcaagaaatctaaagtatggtgataaatatggttttgttgattactttgaattaaaaaagattagagcaaaaaataagaaatctaaggaggcttagaaaatgtttaaaatatcgataattgatcaagagtcaggagaattggtagaagatattaatgcatcagaatataacattcaatggacacatcacgaggatgcaggtagaatacatcattcaatagcattaaacaacgcaaagtatggagagaaatgctggataaagaattatgcttatgcacctatagcaagaaggttagtttctaaatttgaagagttagaaggggtaatagttgaggaaatacttttcattgaagatatggaatgggaaccgggaggagctaaatataactggaaagcaagaattaaaagagcaaataaagatcttactgaatacttgggatataaatatattatagagaccagaaactactatacatctcatatggatatagaaagactgatactgctaatttatcatgagttacttcacattgatatttcagatgatagcataagaaaacacaatattgaggattggagcaatatagttgcaacttttggtaaagagtggtctgatacaaaatcaacattaaaaaacatattggacgatgattttgaagaatgggaaaagttattaagaactgagaaacaaattagcttatttgataatttaggagtaattgattttaagtccatagcaagatagattttatgagttgattgtatagttatctaagtagctgtacaagtcaactcagtatgacatagaaaggagaaagaatatggggaattatgaagctatagcttatgcggtggttgcattatttgaattgcaaagtgaggggaaagaagtaacaccactaaaacttaaagcaagaatgttatcacttatggatatgaatacagaatctatgatttataaaaaggcacaagaaaaaggactaatataggatttgcaaatacttagtgataaataaaaaaagagagctttcgctcccacaacctaaactcattatatttgattttgacgataatatcaataatattcaaggagggcgaaagctatggataaagagttatttaagaaaacagaaggtagattatacaggtattttaaatataaaagggaaatttacagtttaaggaaaagagtggaagtactagaaaatcaaataaaagatatagatgatagtatacgaaatgttcataagtatattaatgtggatccatatcaaaatggagtagaaatattggagaaagttcaaacaagcagaaattgtgcaagttatatggaaattgaaatggaaaaagagattactaaacttgaaaaagagcaaagtaataagataaagagtatgcataaatttgaggttagaataagagatatggaattttatgtaagaaatatgggaatttatatagaaatgcttagtgaagaagacaaaaaatttatagaatataaatatggaaaaggcaaaaaagtttcatatattgcaatggaacttagtgtagctattgcaacaatatatagaaagcaagaggaattggttcggaatattgcatgttatataaagctgacaagatgattagtatagagtatttatagagaaaacatgttttatgttgtataattaagaataatatggaatataaggagagaaaagcatgcattttaaagatgacaaggaaagattaaaatataataacgagggatttaagcttaaaaatgattatttttcatttaagaataataaaatgggttgtttgtacgaaagttgtacaggcaaagcggtaaattcacattctatatctaaaaaaagttctttaattagtatatgtgagaataatgaagtattagcttgtaagtcaataagaaataaggaagaattaacatttgattttaaaagagttggaattaatgaggcaactacatttaaaggattttgtggagaacatgagaaattatttgaaaagttagataaggaaaagattggagacttaaaagaccttttacttcaggtatataggtgtataggttttgcctgttataatgaaggtataatgagggcattagaaaaacaacaaaaagagcgtttgaagaattactataatattgataaattagaaaatagaaatagtgatttacagaaattcttaaatgaaactatagaacaagctagtgcaaataaggtgtcaggattccatagattaagaaaagtgatggcaaaatatatggaattggttaatagcttgagtgatttggacaacaggaaaatagcagatattgatagatttgaaaatgaatccatcaatcatattataagatttaaaagagtaagagaacaaattccagtggcattactaaataattttagttatttttatggtgaaagaaattgtgatatatttttcatagctataccttatgaaaattgtactgatattatcatggttatagagagagatcctggaataaattgcgaggaatactgggaatatagcacggaaagtgatataagaacattaaatttagtagaaacaattatgatgatgtctgaattttggtttataaaacctagtgttataaattctatgagtaaagaacgccaagaaattataaagaatgacatttggtttgcttcagaaagaaaacacttcgagccttatgacatgtctatatttgacgaagtcagaaaaaagttgattagtgaatgtgatgataggactatatcaatggaattagataaaataaataacattccttatagggagaacttggaattcagaaaagagaagatgcataaagaaatgaataggcaatatacccaaataatggcgaaaggaaggtaaaattaactaataataatcaaatgagaagaatttgagaaatatagataaagataaagactataatagtaagtatagaacattctgatcggatactatggtactacaatcttatggagatacaagttcctttcatagatattgtcttgcagattattataatatggaggaatattgatgtttcgaaaaaaagaaaaatctgaagtagataatttaacagaaatgatttcaaaatttgttttgactttaagtggtgttgcattattaattttgtttggatttagaattggaccctatggtgaacagctaaaaatcaatgatatgttaggatatacagcttcatttgggggagcaatattaagttcaatgacatcattaatcatattatatgtaacattcaaacagacgagaaaaattcaagaagaaaatcaaagacaaacttttattagtaacactaatgagaaaatcaaagatcatagagaaatattagagaaagttaatgataacttaaaatcaattaagacaatacgttttaattgcatggcagactctcaaaaggcgcttaattatactactaattatgaaaagatttatcaagaatttattgggatatcagatatgtatttaagtgaagatatagttgagaaatctcactggattttgaattattataatgatgcatttgctagaagaactgatatattaaaaaaagtcgcaagtaacattcattatgattatgctaatgaactcaaggattttatatatttagtagatcagataattttaggattagaacaattctcaaatatgttacataataatatacaaaatctatataatgaaaaatataataaattagattttaactgagagagaacctaaaaaaggttcttttttaatacaataaaattgattgtaaagtttatattaattgaagaaggtatagcaagtgaacaatagaaaaaaattgaaactaaatatgaatcttaatgatagagggatggttatgtgtgctaaatctcattcagaatgtaatggatgcaaagagtgctgtgaactaatggaattatcttatgatcaatttagtaataaagaaataatagaatgttttacaaacgatgaaaggagaagataacatatgacaacagtagttaatatgagtctaagtgaaattattcaatatgaaaataatccaagaaataatgatgctgcagtagataaggttgcggaaagcattaaagaatttggatttaaagttccaataatagtggacaaggataatattattattgcaggtcatacaagatataaagcggctataaaattaggattaaaaattgttccagtaataaaagccgatgatcttactgaacagcaagttaaagctttcaggataatggataataaatcttcagagtttgcaacatggaattatgaagcacttttaaaagaaatggaatcattaaaacttgatgactacaacttagatcttacaggatttgatttaagtgaaatggaacaattagaagataaatataatcctaaagagatccaggaagatgaggattttgatattgaagagcagctggagaatatagaagaacctaaaagtaaaaagggtgatatatggatacttggtaaaaacagattaatgtgtggtgatagtacagtaaaagaagatatagaaaaattaataaatggacaaaaagcaaagcttgtatttacggatccgccttacaatgtaaactatgaaggtgcaacagccgataaacttactatagaaaatgataatatgtcacaagatgaattttatgagttcctttctaaagtattcaataattattatgagaatatggaagaaggagctcctatttatgtttgtcatgcagatagtgaaggtgaaaacttcaggagaacatttagagaagcaggcattaaattagctcaatgtattatttgggttaaaaatgcttttgttatgggaagacaagattatcaatggaagcatgaacctattctttatggatggaaggaaggtaaagcacattactttgttgatgataggacacaagatacagtttgggaaatacctaaaccaactagaaatgctgaacatcctacaatgaaacctttagcattatgtgctagggcaataaaaaatagtagtaagccaaatgatttggttatagatttatttggtggaagtggatctactttaatggctgctacagagctaaatagagtatgctacaccatggaagttgataaaaaatatgctgatgttattgttttaaggtatataaaccaatatggatcagatggagtttatttattgagagatggtgagaaaataccttattcagaagtttaattagtttgataaaaatgacttgcaattaatgtgtttcagagtgattaatgtactaacgaaagaacacggaggtattgaatatgaaagcattatttggaaataaggtattaaatttaaaggaactaaaaggactaaagaaaaaagaagatgaagaagaaataagaaatatagattataaagtaacaaaagaaattgaattaactgataaagaatataaagaatttatagagaacttcactaaggatcaaccttggataacagaagatgatggaggaataaatgaaaaaggagaatttttatgtataagaattaaaaaggccaagaataaaaaaggaatattagtaaattcagaaggatataaatacccaagatatgttgcaatagagagttaagataagcccaattaaagggcttttttgtgtttctaagaaaactcctaagggagtgaaaatgtgaaaggaaaagatatttttgatgaaaagaagttggataaagctaaagaattatctaaacaaggatatactgaggctgaattagctaaaaaactaaatgtaagtattggaactctaaatgaatggaaaaacacttatccagagctcatgaaaattatagaagagaataatgagtattatgaggataaggttgagcaggcgttaattaaaagagctttaggatatgaatatgaagagactgagatagtggctagtaaggatggaaagacttcaagagtaaagaagattaagaaggaagttccgccagatactaatgccattattttttggttaaaaagcaggaatccaaagaaatggcgcaattacaaaacgaactttaattagtgtcaggtggtgaaaatagaacatgccaaggcaaagaagtccggatagagataaggcttatgagatttttaaggagcatggtggaaatattcaaaatagaaagatcgctaatattttagatattcctgaaaaaactatctcaggttggaaagttaaagataaatggaatgagaaattgaacggagtactccaaacaaaaatacggagtactccaaaagaaaagaagaaacgaggtgccccgagtgggagtaaaaatgcacttggaaataaaggcggtcctggaggagcaccaggaaataagaatgcagagaagtttggtttcttttcaaagatacttcctgaaagtactttagagataatcaaggctatcgatgaaaaagatccattagatatcatatgggagaacatccagattcaatatgctgctatattgaatgctcaacgtattatgtatgttgaaagtaaggatgaaatgattaaagaaattaaaaagaaaaaagaagcttactctgacaatggcgaaattaatgaaatagaatatgaatttcagtttgcttgggatagacaggctacatttcttaattcacaaagcagagctatgtctgagttaagaagtttaataaaacagtatgataaaatgctacataagaattgggatatggctactgaagaacagaagcttagaattaataagctaaaagccgatatagaaaactctggggggaataataaaactgatgaagctaagttatgggcaaatacaatacaagaaatagcagcaaagagacgtgataataatggataaatcattaataactttactagatacatattgggataatccggtgtggtttgcagaggatatgatgaattttcatgctgataaatggcaaagtgaggtactaatggctttagctcaaagtcctaaagttagtgtgcgttctggccaaggtgtaggaaaaactggattagagagtatagttgttacctggtatttatgtactaggccatttcctaaagttattgcaacagcaccaactagacaacagctttatgatgtattatgggctgaaatatctaagtggttagccagtagtaaaatagagaatctattagaatggactaaaactaaaatatatatgaaaggctatagcgaacgttggtgggctactgctaagaccgctactagacccgagaatatgcaaggtttccatgaagattatatgttgtttgtagttgatgaagcatctggtgtagctgatcctattatggaggctatattgggaacattaactggatatgaaaataagctgcttatgtgtggtaatccaacaagaacatctggaactttttacgatagccataatagagatagagatttatataaaacatttaaagtgtcatcattagagagtccaagaactagtaaagataatatagaaatgctaaaaagaaaataccatgagggttctgatgtgtggagagtcagagttgaaggagagtttcctaaaggggaaagtgattctcttattagtcttgagtatgcagaaacagccacaataacaaagattaataatatccataataactttactctgcatataggagctgatatagctaggttcggtaatgatgaatcagttatagcgcctagaataggcaataaagtatttgatttattaacgtatactaaaaaagatactatggagaccacaggtaatatattaagggccacagataaattcaagaatgagtataagcatattaacaaagtaaaaataagagttgatgatgatggtcttggtggaggtgtaactgataggctaagggaagttataagacaagaaggattaggatatgaagttatgccaatcaagaatggttctaaggctaatgatgaagaacactattctgataaatcagccgagatgtggggaaatatgagagatatccttgaagagaattttactaactttgtacaaggtaaagaacccacaatagaactccctaataatgataagctcattaaacagctatctaacagaaagtttagaatagattctaagggaaggatagatcttgagaagaaagaggaaatgaaaaagagaataggagaatcaccagacttagcagatgccgttatatattcatttgctgagaatggaattagtgatttatctttactgaaaggaggacgaatatggggttaaaatcatttattagtagtctctttaagaagaaacctagtggagaaatgatgagatcagaagggggttcttatggtggagtttattctttaaattcaagcaaagttaactatgaagtggctaggcagctctacaataatacaaaggatgattataaattgggaagctcatttgtaaaacctattataaatagtacagtaggatttatgggagtaccacattttattacagaagatgaaaatgcacagccaatattagatgattttatactagataatacttcaaaaatgttaaggacccatagtaatgctttaaaattaggagattgttatatatggattactagagaagaaaaagaaaatcctttgtatccagataaaccagtaatgctaatgtacaatataattcctcctgaagaagtagatgatataattttagattcaacgacaaaagaacctatagcatatatcttaaaaagtgaacaggaatggacagatttagaaggtaataaaaagaaagctaagattagacaagttataacggcagaaaagaggatcattgaggttgatggggatattccagaagggatggaaccaggtgaaatacaaaatccatggggatttgttcccatagtacattttaagaatgaaccagatgaaacaatgaagtttggacagtcagatattgaacctatagagccacttttaaaagcttaccatgatgttatgatgcatgctctcaagggaagtaaaatgcatagcacacctaagcttaaaataaagctcaaagatgtagcaggatttttaagaaataactttggagtagaggatccagtaaaatttgcgaaagatggaggtaaagtaaatcttgatggccatgaaatattatttttaacggaaggagaggacgcttcatttgtagaggttaatagcgctacaggagatgctcagatattattaaaacttttattctattgcatagtagacgtatcagaaacaccagaatttatatttggagtccataccccaagtgcgttagctagtgtgaaagaacaaatgccaataatggttaataaaataaggcgtaagagagagcagtttacagaacagtggcaaacattagccagaatgattttaattatgtcagctaaatctgtaggagctaattttacttcttatagcgttaccttgggatgggatgaggttaattctaaagatgataaagaacttgctgagactcttgaaaaagtatgtaattctctagataaagctttatcaggtaactttattagcgaagaagcagctgtgaactttctatctaagtatattgatacaatgagtgactacataagcgatgatccagagatagtaggagaaagagaaaagataataaagactaagatgcttagatataggcttgatgatgctggaggattggagaatgagaaggaggagatagaaaatgaaataggtaaggttgataaagatgagtaaagaaattgatgaattaaaatcaatagctggagattataaaacgtgggcactacaagctagaaaaaagtttatagatttaagactaaggcaagatatagaaattagagatctatatataaagcttactagaaatatatctaaagaattaaaaaagggaggactttctcctataagtaagaaaaagttacaacagatatatagtgctttaaaaaaagctgaagacaatttaaatggtcaactcaccattaattttgaaaagtacactagagaaaatatagaagctgctacaggatactcaaaagcaattacaatagatgttataggaaagtccggcttaaataaaataactgcatctaatataaataaagtatattttaaagtaaatgaaagagcagtagaagctatatggagcagaacacaaaatggtttatatctttcagatagaatatggtccaaagctcaaaagtatagaaagaatatggctgatgtgattcaagcagcagtatcagaaggtaaagattgtactaagactgcaagagcattagaacagtatgtgctaaaaggaaagaaaacactagcatcagaatatccaaatatgatggctagaatgggaaatagagtaccaagtgatgtgagttatgaagctttgagacttgcgagaactgaaatgacatcagctttcggcgaagctactttatcagcagccaaagttagtccaagttgtagaggagttaaatatatactttcagcttcgcatccaaaaccagatatatgtgatgacattactggaactgataagcatggattaggtataggtgtttatcctatagatgaagcaccagtgtatccatttcatcctaattgcttatgtataacaactacagtgaatgaaagaccagaagattttgttcaaaggttaaagagatgggatagggatccaacaagtgaacctagtattgaaaactggtaccaagatgtttataaaaaaatgaataatatctaataagttaggttgcttagtataaagtcttataaatgaattaaggctttttttattttctgaaagtaagtgaaattactcttaattatgctttcagatttaattatatgaaaggtggtgaagtaaaaatgtatattaataacgcagtaggtgaaatgtctgaaacttacggagaaatggattctgtaaatgctgttatatctcaaataaaaccaggtgatattccattggcacaaggagtagatttagattctatgaaatcaatggatagtgatccgttagagatagttgtagaaataccagctactaaaagtaaacgaggttggaattatactcctaaaagtttaaaagatattgtagattacactaatgaaaatactcttaatggctttttggggcatcaaaaggcagagaatataagtacagagtttgttcctccagctacacattggataggcgctgaaatgaaagataataaggcttattttagaggtctagttgatgctgatgctacaaacttaaaaaggtggataagaacaggtaggataaaggaagtaagcatatttggctatcctaaactaaaaaaaggagctaaaggagagatggatgtagtaggatacaatccattatctatagactggactcctttgcatagaccaggtatgcccacaaaaatagtaagtatggaaatgtctgatgtgaaagatcagataggtggagaacaactagatggtacattcgaaaagctaagagaagacttaatggatgctgctaaagtctactttaatgctaacaataatggaagttatgtttgggtaagaagtattagatacgatgatagcacagttatagttgagtatgaacagcaaaacttacctagcaagctatatagtattccatttactataaacaatgatcaagttgttctaggagataagacagaagtttcagagaaaagaatatatgaacctgtaactacaggggaaatgagtcaaggaggaagtgaaagtatgaattttgcagagataatgaagaatcttaaagggttactacaaactggtgaagtaacatattcacaagtattaggagaaatgggacttacaacagataaaattgcaggagaaatggaggatattaaagtagcggtagaagcgcaagacactttaaacaaggtaaaagaagctttaaatgtaagtggtgaaatggatgtagtagagtttgctaaaaaagcaggtgaagctatagagcatagtaagaaagatgatcttgctaaaacaattgatgaggttattaatgaaaaagtagttggagaaatggctcaaggcttagttaagaagatgcttaaggtagaagaaggagcaactaaagaaatcatagctggagaaatagattctatattagcagatgattttataaagaatttaatttctagtaatcatgttgatatgccagctggaactgcgactccaagtagcggagataaaacaacatcaacattaaaagtaaaaagagcaagtatttaataagaggaggaatggataatggcatttaaaggacaaccagtaccaacaacattagaaactattgcaggttgcaaaataagtgatggtaaatcagtaagagttgtatcaagtgaagcggtggaagatggccatttttatttaataaataatttttttggaatggcagttcaatcagcagaagctggtgaagaggtaattttaagcattgagcaggctgaatatgaaactgaacaaataaatactgaagaagcttttgcagtaggtgcaaccatttattatgatgatgaacacaaaagattaactgaaacagaggggataaacagaaaggtaggaagagttactgcagctaaagataccaataatgtaatctggttcatattaggaccacaagtatagaaaatctaaaggagtgatttaaagtatgtcagtaaaaatttatagtgtagaaacgttaaaaagtgcaagacgtaatcaaagcatcgaaactaaggttccatttatattaaatggacaagaaattgaagtagataagaaaatagttaatggagagatggaaacatttgaactcactaggcctataggagaaatgctcagaagtggaagtttagctcaatataaagatttagtaagaaaggttgttcttgatgttgaacttggaagagaacaggtacctttactttacaagcctatatatgaattactatctgatcctaacatgcctaaagtcattgatgctaaatgggcattatatgggacagttatattttctgagcatatggaaggtcaagaaattaaattcggttcacttcaagcagaacatggaccagttgctagaattatgacttatacagcaggatttgaatatacaaaagagatgaaggactttaatgatagtttttcagttgaactcttaaataaggctatgggtgaagcatacaatgcattacttaatcatatgtatttatctccaattataaaggctaattataaagctgataataaaacatcttatcagggaacagcagaggaagatgtttgggtaagatattataaaactttcaacaaagcattgagtgatagtagaactaagaagagaccaggaacaatattattagcttcaagtatggataaagacaacatagagatggctcttaaaggtggatatcaaattaatggaaccacttatccagcagttagtggtattgattcaataatttattatgatggttgggaaataacagttggaaagaaagattattcatatccaggagtagaacaaggaaaagcttatttaataagacctagaagaggatttaaggaattattgaagaaagatcttgaaattgaagctgcgtctggagatctttctaggttagttgaagagcaaatagttggatatgcatacagaggactttacgcagcgatagatgaaaatgttcaagaaataacttttaaataataattatttatataaggtggtgggaatatgacacctacagaagctacgagaattaaattaagattgttattaaatgataaagataaaaaatcatttacagatgatgaaatagacatgctattgaatgaagaggactgtgttttttgtgctgcaagccaaggatggatattaaaagctactatgtatgaaaattcagtaggagaaataacagagtataaaacaggtgaagaaagctatacaagtgctaatataaaagacttagtaacagttgcatataaaaatgcagatagatataagtccatgtgtgtaaatcagtgtggaagtattatattaggacttgatactgaggtaaacatataattacacctgaaagaagaaaggccgatattttaaaaagtattagccttaatcctactgaaattaaaattaagcagatagttaaagttttaaaggatgggtatttcgatgaagaagaaaaagaatataatcttacagttagaatatatcaacaacgaaaaagtaatatagagatatcttcaggtactataggaacagcttataaatctaaaagttatggtatgttggcagattatgaagccaatttagaagttgatccgcaaaatgctattgaattcaatagtatatatggtcatatgaaaatgatagcagtatatccgcagataattaaagatgaattatgtggttatcaagtagacctcgaaagaataaggtaaggaggttttttatatgggctttagagctatagattatattcaaagaaaagcagcaggaatgtacgctctttgtgataactgggctaacactttaagagatgaagtaaaaataaatgcaaaatggaaagatagaacatctcatgcaaggcaagctattcatagcgatgtagaaccaggtaataatgagtatacgatatatgtttcccatggagttcaatatggagggtatcttgaggaaggaacaccaccacatatcataagacctaaaaataaaaaagcgctatattggaaaggcgcagcgcatccagtaaggcaggttaatcatccaggaactaaaggatttaaaactatagaaaatacaatgctagctaataaagaaagaataaaaaatactattatagattattggagtgattaagtattagatgagagcaggaattagacagcatttaatagattcagttgcagatcttaaagattgttatgaacctacagtaccaactatggacacattaaaaccttatgcagtaatacttcaaggttcagataatgacaatggagaagttattggatttaaaagaactatagaaatatggctatatgaaaagaaaactacttttaagaatctagatacattatctgaaaaggtcattaaagcattgcatatgcaagtgatatctgatttagaagtaaatgaaactttcacatgtaagtttgaagaagcaataggacaagatattatagatgaagaatggaacgctatagctagaggattaaaatttactgtaatagcattacatgaagaggatcaagtcaatacggatccatggcttgatgctttaagtgagtacactaagaagattatagattataaagtgtatttaaatacatggaaaaaggattttgaagttccaagtattctatggagagtaaaagattcaagtaaggaaagagaaagtaatgctgttattaaagagaataaaactctaatatgccatattgctagtaacaataaaaatgaaattaataagttactggaagacatagagaataaacttacttctgatttgaaaatacctttagatttgaaagataagcgttatttaactatagaaagtatcaatgaggatagagaagctgatatgttatctaaaggtcaattaatagtaaagttctttagaagaaaaatgatacaaattaatgaaaagcctactatcgataagattcatagtagaggtaatttaaataaggagtgatatttgtggatgatgtcgaagcgaatgtttcagaggttattgatgaaagcaataatataaattcagaatcatatgacgctacagcgaataatgaacaaaatcaatctaaaaaagaatctgataataaggaggaaactatagtggcgagtcaaacgatagtaactgatgaaccaacacactcaatacaagaatttatagataatagtgaagcacttggctacaagaaagaagtagttgcaggtgctttatttagttgcaaaaaatcagaacttacaaaaacagaatttgaagcaatggttaaagaatttttagggaagaaggttgaataatggcaacaggtaactgggatgaaaaaaataagccaactatacctggttggtataacagatttaagaataaggcacaagaaagaattggtacaggtatccatggtattttagctatgccggttaaagctaattggggaccagttaatactgttacagctataacggtaacatcaacatcagaaaacacactgaagaaaacatttggagaagatcctaattatactgcatatagattaggaaaattagctttacttggccaacctaaagcagttttattttataggattgtagatggatcacaaaagactgctactttaactcttaagaataatgcatcaacacctgcagatgcaattaagcttgagactaagtatccaactataagagcgttcaatgttactattaggaataatatagctgattcatctaaagtagactttatattgtatgaaggagcaactcaattattttctatgagtgctataagcggagatatagatgatataatttcagctattaattcaaatgtagaaaatgaatatcttattgcaactaaagtttcaggagccacaggaacaataggtaatgtagcaaatcaagctttaacaggtggaaatgatggtacagcaggaataacaaatgagcattatttagatgcaatgagtgcatttgaaggctatggtatggatggattcacactagatggaatttcagatcagtcacttcaagcaagcgtaaaggcttgggtaattaaaaataaagaagaaggaacaaatataattgcttttgtaggtggaccacaaagcaattattcattagaacaggtaaatagcagatcaaaagaatttaatcatgaagatattgttaatgtattcgctacaagtgctacttatgatggaaacacatatacaagttcagaggtagctgtttatatagcagcattagcaacagcggcaggattaaaagacagtatatgtaatgcggttactatctttgatgatatacagcctagacttaataaaacagatactgcagcagcactagcagctggaacgctagtattagctaaagatgctgacaatgtcattgtggttgacgatgttaatacctttaagaattatacagatgataagacagaggtatttggaagtataagagcaataaagtttatgaatgctgtagatggcgatacatcactcaagagaaaagatttcgtaggaaaagttactaatgatgatacaggtagaacattaataatcatagctttaaagcaatattttgagactttagttgcagcaggtgtaattaaagatgattttacagttgagattgatacggaattacaagcaaatgccaagtcagatgaattcttttggaaatgggatgctacttatcttgatgttattaaaagagtttatggtactggaaatgttacaaaataagaaaggcaaggtgatataaatgaatgatgtattagatgcgagcagagtttgctctggaacttatggcaaaatttatcttgatggtaaatggcataacaacgttagtgaatgtactgctgatgttgaaacagatatgaaatcaattattacatgtggaagtgaatgggaagataataaagctggagctaaaaaaggttcaggaactataaaaggttataaagttacatcagacatgattaagcagggctttaagaagtttgaattacttgcagagttagatgatccagaagcttacggagctgaaagaattagattaaaaaattgtaaagctagtaaagttagtttagttaactttaaagctggtgatatctgtgaaacagaaacaccatttgtatttagtggatacgagcttgtagatccaatagaagctgaataaaatataaggccaagcaaggggcattgtaccttgcaattattatatatttaatttttaggaggaattttattatgaagaagaatgaaaaagacgaagtattagcaatgaaggaagaggatatattagcaaagttgcttgagacacatgacgttcctacagctaatatccaagtgccaagattaggaatagcaattgacttaaaaggactaactgaaaaagaaattagcggaataagagaagaatgtacaactagaagaaaaataaatgggaaaattgaaacaaaattaaataatgctgattttgatgctgcacttattataggggctacaactaacttcaattggaataatccaaagttaatagagccacttaagcttagtgatggtaaagcatatataagaaaaaaacttttagcaggtgaaatatcattcttggccaataaagtgttggagctaagtggatttaatgatgaattagaggaaaaagaagatataaaaaactaataagttggggcggagatataactgcactgtataatttattctcaatgcataatatctgtcctgacgaattttatggagtagaaagaaatgatatggctaggagattaatcttagctttttcttcgtatgaggtagagcaaaacaataaaagagctacctcaaaagctgggaggtgataattctggctaataaagaagtatacaggcttgatataaaagtcggagtttcaggagattcggaatcaaaaagtaaacttactgcagttgaaaaaatgactcaacaaatagagaagaaagcaaaggcgttaagtaaaataactgctaatgctactgcaaagcttaaagacgaggcatcaagtaaaatagaaaagttagaatcgaaggttaacaaattaaaaagcactagtatgactttaacagcaaaaatcaaggatgaagcttcatcaacagtagataaaatacaaagcaaaacaaaaaagataaagcaggtaaatgtagtagttaaagctaaagatgaagccagtaaagttataactggaattgagaataaaattaacggatggattaagacaggagctaaaaaggtaatatctattggaactgcaggtgtaatagcagcagggggaataggtcttggcacatcgataaaaacttactcagaatatgaaaaaggattatcgaatgttaaggcggtaaccaatgcaactaattcacagatggagcagttagatgctgcagctaagaagtttggttctacaactgcatggagtgctagacatgttacacaagctgaagaattattgggacaagcgggatttagtgttaatgaaacaataagtgcattgccaggtttattaaatcttgcaagtgcaggagatcttgatttagcatcagctacagatatagcatcaggaacgttgagagcttttaatataaatgctagtcaatcaggtcatgtagcagatgtattagctttatcagccagtgctacaaactcggatgtatcagatcttggtgagacgatgaaatatgtagctccagtttcacaggcgttaggaataagccttgaggatactgctgcagctgcaggtttattgagtaacgcaaacattaagggaagccaagctggaactgttttaaggcaaacaatggctaggcttgcaagtccgactaaagatgcagcagatatgatgtcaatgtatggaattaatgcttttgatgcacatggtaatatgaaacctttaagcgatgttgtagataacttaaatggttcattaggaaagctaacaagtcaaaagagagcagatgtaataagtacaatatttggtacagaatctatgtctggagtacttgcattaatgaatcaaggaggtaagagcgttagtgaattaagtaggcagcttaaagatgccaatggagctgcacagaaaatgtccgatacaaaacttgataatttgcaaggacaatggattaagcttaaagcagcggttgaacatatgcaaattactttaggtgagaaattagcaccatatgcaaagcaatttgtaacatggttaactggtaaaatgccaacaattacagataagattgttgaaatggtcgattatgtaagtaaacatactgaagaaattaaatcactagcagaaatagtaatagggttaggtgctgcatttacagctttgagcgtagctgggaaaataggtaatacaatttcaggaattagtagtttagtaggaatatttaaaggcgctaagatatctacagaaatagctgaagcagcaggagaaatttcaaaattaggtgtagtaggcaagttattacctgcaatatttactccagcaggtcttgcaatagctgcatcggttgcacttattgggacagcaacagttgcgcaaagcaatcttatgaagaagagtgttacaaccactacagaagaattagggcctatggaaaaagtaatgaatgcattaaacggccatataaacaagtcaaagaaagagatggttgaagcaggtcttatttatgatgattttggagaaggcatttcagatagttttaaaaaaggtgctcaagatgcatcaaagagtttattaggaattgaaatggatataaataggttaactaatagcgggaatatggatgaatctagccttaataagttaaagaactatgtaaatgattatgcatatgaaagtattaatgcaatgaaagatcagaaatctaaaattcagggtgaattccagaaaactttcagtatagatggagttacaagtgatactgaacaaaaagtgatggattctttaaatacttattttgagacaggtataaataaagaacttgatataagagatggcatttatcaatttgcaagtgataaaataaaagaacatggaacgcttttggatgaagatcttaaagaaatacaagacagattagctaaagcgaaagctcttgagttagaatacactaaagcacaaaatgcttatgatgcggaatattcgaagaatcaatttacaaatgatgcaagcagggtaactggcatagatggtgcgagtgaattattgcagaatagggcgaaagaccaccaagattccttagataaaatagaaaataattatcaaggtacattagcttattatgattcgttgttatcaaatacagatttatcagatcagcaaagagaagattttcaaaaaggcaaagatgaggcaggcaaagcaagagacgaagcactaaagaaagcacaacttgattggaaatcagatcttgaaacattgtataaagcatatccacaggcacaaggaatgtttaatgaaaaaactggagctaagtttagtgatgaagatatagtcgcacataagggtacagattacttaaaaagccatttccaaaacttggaccaagttactcaagaaggttggtataggattaagaatactacaagtggggaaatggaagatatttatgctacagttgataaagatactggagaaatcaatggagcatggagtaaaactgctggatggtctggtggatatactgatgagctgaagcaaaaagtaaaagagcttggggaaacacatgagtcagagagagtaagaatacaaaattcgttaagcacacttactggtagtacattagattctaataatcaagtaattagctcaacgggagatgtgattggccaattaaaaggtgttcaaggcgctacagatggagcaattacaggaataatagatataaatggaacacacatgcagataacttccaatgcctcagggcaaataacaactatgcaacaatataaaggatcaatagatgatattcctcctgatgcagatgttcatattaatagcaatgctagtaatactatatcagatatgcaaaaggtaaaagaagaagttaatagtgttgatggtaaggctgcaacagtaactataaataccgtattttcaggtgtagcaactagtcttggtcaagtattaggaaatggtgcagtaaatgcagcatcagaagttataaagaatataccacaacattataatggtacagataatgcagaatccggaataaattcggttggagaacgtggaatggaactagtattaggaagaaggctctataatttcaaaggtggagaaaaagtcttaaataatagtcaaactgtcaatttattaaaagccagaaataaacaagataatgaaccatttcaagttaagcaaggacaatataagttagctcaaccacaacaagtacaagttgtcggcggaaatggaaattctattcaagttgatgtacaagttaatagtggaaatcaagatgttgaaaaattaattgtagaagtaacatatgaagtggggagaaaacttaaagaagctttgataaacattaaaaagtaaatgaattcatggtatactttggcataagggagggagtatctacagtaaatgaaagacaataggaattatctgatagaacaatacctataatcgtacagtacaatgataatccagtagttaacttagaaaaaagaactaagattaaaaatcatatgaattctgtgtcagaaatgaaggcagatgcaagaagagaagttgcaaaccaaatatcacaataaaaagtgaaggtatatcaaccccaactagcagttgcaggtagtagtaatagatttagttttaatatgggaggaataaacataaataatatgccagataaagcagctattgtcaaacaggcaactcaagaattcgctaagaagtttatggaagtattgaataatcaagcatggatgttataatatggtacaagggggagcaataatgataaaaaaaatattgggtatatttagtattgtacttataacatgttttctaataagttgtggtgcacctaaattattagataaaactgaagaggcaaataattatgaaatgcaaaatgggaaatggaattcaaaatatacttatgtaaaagattgtaacgttaaatttataacttcaaattacagatacgataatgatatgtatgctgataaattaactatgtatgttgaagaaaataataatcttggtaaagggtattttgttaaaataatagatagtaatgataatattaaatctaaactaggagaatctataaaaaccggcgatgaaataaaaatatcaaaggctgaagttgaacctaattctttaaataaatatcctgataatgtattattattagcgactgaatcgaatatagaattattgaaagaaaaggaatcgagcgtttcaacagacactaataatgataacacttcgttaaactatactcttgagtttggaacattagtagatgccactgtgaacaataatgtattaataattaaagctaagataaaacctagcgttagcaataaaactacaattgaccagaatggatttaatgttggggacttaatagtaaatcaaggtgcgagccaatttgatgaaatacaatactgggctgtagctgatatggaagatggatcagaaggcaaagtaatttcttttacattaaataaagaactaataaaattagtgaaaaaacagactatacttggtaatcaaatagtggataaggctagtaatgtatggatattgccaagcctaaaaaattaaatttaaagataaagaaagcatttaggaaaactaggtgctttttcttatgcttaaaataatggaaaggactatacacaaggtagaggagctggttaattggatgtatatttaaaggatgaatcaaaaaattatactttgcagtttcctgttaatccactagataagttatctaatcctaaagagaaaaaatatataactgcagatattatagattttggagaagttgatatttctcaaaagggaagcaaaataagagaagtaagttttaattcattattcccaaaagaatatgattcctattgtagatatgttccgaatatgctgcctattgattatgttaatacaattcagttttggatagatgcagatgtaccagttaggcttataataacagatttaaatataaatgaattagttaatataagtaagtttgaaacagaagtacgaggtggagaggtagatgctatttactttagtattactttcaggacttatagggaattgaaaattgaaacagtaaacaattcttcgagttcttattcaggtgggcttcaggataatagggcagataatagttcaagtcaatatgtagatggcgatgtggttaaagtaactgcaagtgcattgaatgtaagagatggaccaggaactgataataatattattggagttgcttataatggggaacaactaataatattcagacagtatggcaattgggctgatacatactggggaaatcatggaggttttgtatgtttagactatgtaacaaaggtgtgattatatggaacttgttttaaaaaataaatataaaatacaaatattaagtgagtctgtaacacttaaagaagctatagatggaatagcttatacattaaatatatctctcatagagactcaagaattagaaagtataggtattaataaaggtgattccatagagctctttgataatgaatttgatagtggatcttatactcaagtttttaacggaatcatttgggagataaataaaaataaaaaatctaagaaaatcacaataacaggcaaagagagaacagttgttattgaagagtctgaggatgaatacttgtggagtgatggacagacagcgtcacaaaggactaagataatttgtgatgattggggaatacctataggtaatcttatagaaactggaactggattagctaaagataaaagaaaagagtctttgtatggaatgataaagaaagacttgaaagagactgatcaaaaaggtggagatctttataaactaagaatgaatactagcttagatataattaagcttggatcaaatgaaactatttataaattagataatatcattgaagagttagaagaaaaagacagcttagatggtgcggtaactcaagttaaagtgcttggaaaagaagatacaaagaaaaaaggtagaaaaagtaagtctgatagttctagtagttcagatgagaaggagcttgtattgtctccgattataggagtatttaaaaaagataccgaaacttatggaacattacaaaaaatagtagatgatgataaagtagacgattatgctaaagcacaagctaaagctgattgtcttttttcgtctggtgaatcaagcaaaacagttacttgctgtaaagatataaatattttaagaagtggagataaagtcagcatttatgatgaagaagttattataactgatataactcataatttaggttcaggaggaaaaatgactttgactgttatgaaaattgatgatgtaaggaggaaattctatagtgagtaacaatgatggagatgtatttaatgaaattaaaagaataatggatagtaacacacatggagcaattaaaggagttatagaaggaactggactcactttaggaagtataacggaaactggccttaagctagacaattttaaacatgaatttacggattacatggtcttagattatttaaaatcggaagataactattccacagaatcagcaggtgatccaagtcattctcatgaaattaaaacacctagtaatcttagaagattaaatataggagataaagttttagttgctcagtttggagctgataatgtggttataggaagggtggtttcaaatggctgatttgtttccaagtggaagtttagagtcaactaacttaggtaatgcttcattgactactggattcaaaggatcatatgcgattaattttgatactatggaatttattaaaaatcctgatgggacaataaagatacttgatgcctatgaaacttatattcaatggtgtcagttagctatgatgactgctagatataggtatagagcttacacaagtaagttcggtagagacattataggtaaaatgatagatcaaaaagccatggaattagaaattaaaagagttactacagagacactaatggttcatccaatgactgcaagtatagataattttgtatttatatgggaaaatggtgaagtttattatacctacgaagtcacagctacaagtgggcaaagtaaagttctttcaaattcagaaaaagtggggtgattaaatgggggatttaattcttccagattttataatagaaagtgcagatgatattcatgctaggatgattgctgaagcgccagagaatatttcaactattgaaggtgatatgttttggaattcaacaagtccatcagctaaggaaatagcaagagctaaaaatatagcacttaagaaaattttatattcaaggtttccacaaacagctaatgatgatgacttggattattgtggtgaagaatcaggggttaaaagaaatgatgctgattatgcaatacaaaagatgttatttataggattggaagggactccgatagaaaaaggtagaatagtttgcacagaagctacagaagaaaatgcatcaattgagtttagtattttagatacagttactatagattcaagtggtgaagctactgtgaatgcaaaatgtacaatagcaggcactataggaaatgtagctataggagaagttaaaatattggctaaatctctaaacggaatttctagtgcttcaaatatagaaataattcaaaagggtgttgataaagaagcaaatgaaagctataggcaaaggatattagaaaaagatagaaagccaataactagcggcaataaatatcattatgagatgtgggctaaagaagttgatggagttggagctgctaaatgtattcctgctcctggtaatgtaaaagtaataattacagatgtaaataaacatgcagctacagccgaacttattcaaaaagtttatgattatatagattctgtaagaccaattttggcaggcacattaactgtcgtaagtgcagttgaaaaggctattaatgtgatagctaatgtacaattagtaaaaggatataatttaggtactgctcagaaagaatttggcgattcacttgataattatttaaaagaaattccttttgattctactaacactgctaataactatgtaagcatagcaaaggcaggaaatttgctttttagtgtaactggtgtagtagatcatgctgatttaaaaattaatggattaatatctaatataagtcttacagatgaagaaattgcggttcttggaactgtaaatttaggggtgatgtagttggatgtaagtaaatttaatgaaaagcttaataaagttgatggtcatacttatgttatagaagaaactgtttatcctgtaagtggagtatacgaaaaagaacttgaacatgataatgtaaatatcacaacccttaatgtatatactggaagcaagttgacaggagataaaattgattcttactcaacttcaacgccaagtatgactccttggaaaactataataaggatatttagtagcatatcacctttatatataagttatgagacttcaggagatcaaatagaggcagaagatataaacaatcttcaagatgcagtcgttggaactcaagaaaatcttaataatgaaattaatagagctactaatgctgaaaaagtactaactgacaatttaaatacagaaatatcaagggcgaaaagttcagaaaatacattaacaaataacttaaattctgaggtagcgagagcaaagagtgctgaatccatcttaacaactaatctagattcggagataaacagagctaaagctaaagaaagctctatagatgcagaattatctaatagatatacaaaagataaagtttatacaaaggatgaagtgttacaaaagatatcagaattaataaataacgcgcctaatgttttagatacatttaaagaaattgcagatgcacttggaaatgatcctaattttgctacgactatgactacaatgttagctggtaaagttgataaagtttcaggaaagggacttagcaccaatgattatacagatacagaaaaagcaaatttagcagatacaaataataagaagcatgagcatggaaataaatctgtaatagatggaataacagccacattaattggatattggaatgctgcttacacccacattagtgacaccattaagcatattacaagtgatgagagaaccttatggaataccgtgagtaataaggtagataaaataacgggaaaaagtttatctacaaatgattttgataataactataaaggcaaaattgatgggattagcagtaatgctaacaaagttgaagtaagtacaactaatggaaatataaagatagatggcgctgaaaaaacagtttacacacatccaagtggaactaatccacatggcacaactaaaactgatgttggattgggtaatgtaactaatgaccctcaagtaaaaagaagtgaaatgggagctgctaatggagtagctacacttgatagctcgggtattaataatcaagctcctaagcctcatacacatgatgatagatattatacagaatcagaagcaaattcaaaatttgcaactaaagatgaaatatctaccgctggatatggtgatatgcttaaatctgtttatgatattaataataatggagtagtagatagggcagaaaaattgtctactgcaagaaaaataaatggtgttaattttgatggtagtagtgatataacaattaatgcaattcctagtggtaaaacaatagatggtaattttatttctaattttagaaatcaagtaaaaggtgatacaaattcaggtgattttcttgcaagtattagaaatgatactgctaatgtagatagttcaccacagtttggctcggggattggttttggaagaggagatactcatgggtatttgtacatgaattatagcagtgcgtttgcatttataggtgcaggaaatgctggaaaattaaattggacaaggcaattagcgtttctagattcaaatatagcgtctgcaactaaagcaacacaggattctgatggaaaacaaattaatagtacctatgtaaaaaaaggtatgacatggaatgatttagagggggtgtagtatgtatggatcaaatcaatatggcgtagtaaagtatgcagagaatataccaacaccggaagatataaacaagcacaagattgatttaacaaaatatgtacccccatttgttgttgaaattccagaaatgaaggcttcctatgatgtacaaggtacagaaatagggagtctcttatattatgctgatgatgtaaaaaaacagctaagaatagatacagctacatgggggcttatttattgggaagaaaggtatggaattgagacgaacttagacttaagctatgagcaaagaagagagattgtaaaagctaagaaaaaaggtcaaggcactacaacaaagcagatgatcaaaaacgtagctgaagctttttctggtggagaagttgatgtgattgaaaatacagcaccttatacatttacaatacagttcataggagttaaaggaattccgcgtaatatgcaagctttcatcaatatgttagaggatattaaaccagctcatttaggatatgtatttaagtatacttatacatcttgggattatttagataacaaaagcctatcttataacaatgctgaaagcattaagtgggatgatttagaaatatacgactaaggaggatgattaaatgcaattatcaagtaattatggacttaaattatttgaaggaactgacaatgttaaaaggcaagattttgtagataactttacaaaaattgattctgtaatgaaagaacacgagacgcacttgtcagatattgtgtatcagacagcaggaggttcagctacagcaataacacttgcaatcaaaggaacgttagtaaatggatatccaataacttttatagcaagtgcaaacaatgggggagctgcaacaactataaatggtaaaaaattatataaaccaggaacaacaacatcaccaaacttgatatcaggaaaggcatatacggtttggtataattcaaccggtgattgtttttttatcaaagctagtgcagaaggtactgcactagcatctgatgtacgtaaaaataaaacttttagtaatgataatgataatggtatagttggaggtcttgatttatctttattagttccaggaaatataagagcaggtattactatagatggcgttacaggtaaatcttctattgtagatacagcagatgcattattagattctcaatatttgctaaaaggatatagtggatatgatgatggagttaaaaagcttggaactcttgataatatgacaagtgcaattaatataggaggagcagattcgggtgacttttacaacagttctggaatttgtggtggtgttgccactaatgaatatgtaggtgcatttgatctttatattccaaaggggtactattcaggtaccggcacaaacagactacatattccgaatttaatgccgtggaatatagttaacggtgtaaatattggttggaatggtaagagtattgttgggacagcattaacttatcaacatgtatctggtgcattggattacacaataccgagatattcaggaactagttcaaatcacacttcttatagctataatatatctttaaatttcgtaccagatttaatactttggttacaaacttcaccaaaaggggcttatgttatttttccaggatttagttcaagtccagacaatttttggttttatataagcaatcaggtaatatactggtacaatgattcggccagtagttttaaattatcaggtagttggcatgcatggaaatttagttagcattaagtaaagggaaggtgaaaatcaatgaaaaaattagcaatatacaataaaaatacaggagaaatattatttacacaatcaggtggaactgaattagaagataacatattaacaaatttatcttgtgaagttccagatggaaaaataataaagtcagtaaatattgaaacaaaagaagcaatatttgaagatatacctaaatcagaattagaacttttaaaggaacaagtaaatgacttagcacaagcaaatgcagagctaacaagtatagtagcaatgggaaaaaacaatgcttaatataataaatttaattttaaggagagtgtttaaaatgcaatttaacaaaaatagtggatgtgtaaaagtatgggtaacgttaatagtaggcggtacttatgaatataaggatgttcctaaacttttaaatttacaagagcaagtaaaattagttcttgtagatatgggaattgaagaagattcaactacagaaagcgctgcatcataggaaaataggatgtagtaaataaaagaatataagtactatattagcacccaattaggtgtttttttattgcttatttaaaagtattgtctttagaaagattatatttatatttgtaaaaaattacttgattttgaatatatgaaagaatttgtattacgattttacttggattaaattggtagagcagttactataaatatagagaaaagaacgcgcgttcatttattattcaaattatttaataagggagaaatgataaatgaaaaattactttaaaaagtttagtataatgcttattatgttattagccgttttaggtatcggaacgattcaaaatggaaatgtagcgaatgcagctactgttggacaacaattaactcagccagaagatggatggaaaagatatgatgatacggactccaaaatacaatacagccaagagtttattaatactacagatggtggatgctataatgaaactttgcattacaccacaaataaatcaaatggtactataagtttcaagttttatggaacaaaacttagaataattaatcctctttatttaggttattctgataaaattcaaataactatagacggaatatcagattattacacagaaacgacttcaaagtcagcattacaaatgctcttgtatgaaaaaacttcattaccattagctatccatactgtaaacataactaaaattgataatggttcatttagtgctgactttcatctagatgcaattgacattgataaggatggatatttattatcgtctaatgaatcaatatcattggataagtcatcaatggatttagttgtaggagattcacaatcattggcaactacaacgacgccatctggagcaacagtaaactggagttcatcagatgaatcaatagctacagtagactcaactggtaaagtcacagctctaaaagaagggcaaacagtaataacagcaacaactgctgatggtttaactgcaacatgtgtggtaactgtaattccaaaaactgctgaaccaacaaatccagatccatcggattcagataaaatagttaatattgctcatgcaaaaggagataacactaataatgctggcggagatgttacaattatattccatggagcagctgatactatattgagtgtagtaaaaacagcagatgtaaaggaagtatgggtaggagataattttacatatactatagtagtaactaatactggtacaaagacagctaaagcagtagtagtaaatgatccagcccctaatcatattgattttgtagtgaatggaataacaacaactcaaggtacagttgatccaagttcaacatctaaaaatattatagttaatgttggtgatattgctccaggtgcaacagttacaataaaaatacctgcaactgtagttctataagcatatgattgattggaatcacgatgagggggaaatgataaatgaaaaattactttaagaagtttagtataatgtttgtgatgtctttgatattaatgttgggatccgttactactgcttttgcagctccaacggatggttttgaaatcggaactactaatttaaataatacagatgaaaatagtgccaaaattggagatcaattaacagagcctgaaaagggatggaaaaggtatgatgatacaaattcaaaaataacttatagcttgataagcttgtatacaacaaaaactcaagggcattataatttaagtatgcaacgtatacctgtaggaaatacgattaaatttaactttactggagacaagttaatcattataacactagcacgtccggattcgaaagggtttgaagtatatatagataataaagatgtaggtaaaataactgataatttctctagtacccctgggcgatttcagaatgtatcatttgttaaaacagatttggattataaggaacattatgtttgtataaaaggggtagaggattcagggggaatttattttgatgcaatagacatagatagaaatggagagttaaagtcatacaatgaaaatatttcaagtatttcattaaataaatctacagataacttacaagtaggacaaacagataatttagttgctacaacaactccagcaggagctcaagttatatggaaatcaagtgacgaatcaatagcaacagttgattcgacaggtaaagttacagcagttgaagaaggaacgtgtattataacagctactataaatgacggaagtaacctaagtgatttctgcacaataaatgtaactaagaaagatactactgaaccaaatgaaccagataattcaaaagcaatattaataataaatttaacagatggagaaaccaaagtttttgatgtttcatattcagaagtgagtaaattcaaacaatggtataatactaaatcagagtttgagaataaacttacatatgaatttaataagacagttaactctagcatctcagtagaagaagatgttgtacatgatcaaataacatcttatgagataagaaaatattaaaaaaatgtatattagaacacttgcagaaatgtaggtgtttttttgtgtatataaaaaatttgagctaaagtaggtgtaatatgaatgaagaattaataagagacaaaatagaaactcatgacaaaaggcttaataatcatggcgataggcttgataagcttgaacaggatgggagggaactaaagacagaattaaagaacttatgtgaaaatctgaaaaacttaactagtatgatgaagtggtttataactgcaatgggaggagctttaattagcttctttttttatgcagttcaaacaggaatatttaataaataattggaggtatggaaaatgataagaacagcattaaagttaataattaaggtattagaaagtaaattaattaaaagtggaattgaagaaaaaatattaaagaacaaaaattatgttactgtaggaaaagctatttggaacatagtagatgagaattttagaataagcaaaactgtagaggaaaaggtattatctaaggcagatcagtttgataaattactactagctaagtttccagaattaagccaagatgatgtgtcagaaattagacaaacaatagctggtgaaataaatcaaggtaaagcagcagttgtagataattctaccttaattaagcagttgcaggatgataatacaaatctaaaagctgaattagcagcattaacagaacaatttaataaagttcaagagttattagtaaaacctactgatgtaagtacacaacaagtaacagcttaattttagagtagcctttataggttactcttatttgtatatttaaaataagaaaggaagatataaatgaaaggtatagatgtaagtaatcataacggaaatataaattttaaccaggtaaaagcagcgggaatagaagctgtctatattaaggctacagaagggacaacttttaaagacagttatttagacactaactattctaatgcacattacgcaggattaacaacaggattctatcatttcttagttggaactagcgcaccagaaactcaagcaaatagtttttataatgctattaaggataaagctaatgatctaattcctatgctggatgtagaaactaattttgatggtctaatggactatatattaagattcattgctaaattcaaagagttgtctaatatgcaaataggtatttatacttacactagttttatggataatttagataatagaattgcagattgtccattatgggaagcaaattataacaatactccatggaaattaaattctaatttcttcactaatagagtaggacatcaatatagtgaaacaggatcagtaagtggaataaatattgattgcgatatgaatgagtttaatgaaggaatattaaataaaactactggatatgctgttacaaactatttacctaatggttaccaaggaaataatgaatttgaaggtgttgattctgattatgttctcaaatattttaaagatgttaggtgttattttagaggcaatgagaagggcgtatggatagagactcaaaacttacctatgagcaaatgcctagaattaaaagaaactttgggaagttggttttatgatataaagtagtttctagggcatgggagtaatcctgtgccttttattttctgaaacgagaataatttaaagtttgctagagaaactaacggtaaaatagttagtctaatcaggaggaaaattttagttatgaagaaaatagttgctttaattgttattgtaaatttcatttgcaggataattgggtttactgtaaacattaatgaagttgtcagagttgataatttaattgaaaaagatagattgcaaactataaaagaaaaaggaaatcttactgttgcagctgcctcaagtgatccaccgttctattttttagatattaacactcaaaaggtaagaggcattgacgcagatataataaatgaaatttcaaataggcttaaaattaataaagttgattttaaaagcacagtgttttcagaattattacaaagattaaaaactgacgaaaatatagatatagcatctggtggaatgtatataattccagagagagagaaagaagcatcctttactcatccattatatgcggaaacagaggcagttatagttccaaaggcatcaaaaattaatttcaaagaagatttgaaaaatgcagtagttggagtagaaaaaggaactatatacttagaattagctcaaaaatggaagactgctggcttaataaaagacatagaaatttttcaaagcatatctgaattgctagattcaataaacaatgggaaaatagatgctggtatagcagattcacttgttgtaaacaaagatttaaaagataatacgaatctttttttaaagacgctagatgattatagcccggaactaatagggaatgtaggaatagctgttagaaaaaatgataatactctactaaacgtactaaatgaaaagattgatgagatgaaagcagatggaacgatgtacgcaattcttaaagaaaatggattagataagaataatattgtgtaaattaaagaactgatatatgttagcagtagataggagtaatccaactactgcttttttagaatatttaatgagggtagataatgaaatctttttgaggcatggagaaatatacaacaatataattgctcatatcactttaatatattatagtatttggaaaatgttactgaaatattccgattaacttattacgtaaaggcactttttaaattagcaaagaaattcatcacaattgtattaaaacgattcatttttttatatattcctcgtaagggaacggaactataatttctccatcaacaacattatagtttgtattttcagtaggacttaaattgttaactaaattcattccaacattatagaatacttctgctaaaactttagggtcttgaataacagtaccagtcataaatcctttatcaattagagattttgcttcaggaattccatcaattccaacaacagctatattttttgatttttcacccttattatagccgtatttttgaagtgcctcaactgcccctattgccatatcatcattatttgaaattattgcctcaattttaccatcatatctaagaaataaggattcaatagaatctttagataaggtcttaagccaattagcatttactaatgctaattgttctatatttatccctgaattactaattgttgaaatagcatattttgttctgtcgattgtgactggatctttagcttgaccatgtaatagaacatattgtagaatgttatcattatttttatctagtgcactcttatcagcattccatagattaactagaatattaccttgaacagtgccagctaaatcagaatttgccagtataaaagcagctttatcataatatttagaaactttagacactacttccggatctacatctaaaaaaactattggaagattttttgatttaactttaaaaataatatcttcaacaaagttttcacttgtatcagctaggtttgccaaaattaaatcgaaatcattttgagaaacgtaatctattgtttcattttgtagcgctatattgttttttccatcaaaaaaagtaaatttgattttatcagaattatccttttggatattttctaaactttgtttaagtgatgacataaatggatcgaatgtatatagtaatacggcaacatttgttatatttttattgtttaaatttaggtcgtaaaatgtactaattttaataaattttactgtaatattcattaatagtactataactaatactttttttaatatccacattataatcctccatttagggtattagatttaatgatatgattttcttctatttttatgaaatgtatacatcaccatcaccaacaattacaattctgtaatcagctttaaatggaattaaattatatttttgtgagttaggagataaatataaagcttgaaccgcaagaaaatttttatcgaatataactatataagcatttttatcagttgaaacattttgaacattatatgtattagtgtttatagcgaagttttttaaatcgtctggggtatatacgccttgcttgtatatattgcttggagtaggatcagctaaagctagagcaggaaaaacacataataaaattaataatacagctataatttttttcatttcaaagccacctttcatacttagtatggcatcaaatttaaataacattccttaaatatcattgtatgaaaaaagtaaaagcagcaactagaaggaatctaattaccgctttttgtgaattaatattatgccagtactgttgagactactagttttttaggaaatactattatataactaatatattacaaataaaggaaagtgtgtaaattaaatagaaagtagtttgacttttgttaaaatatgttatgatgtaattgagagagttaagagaatatgttgggtgctcatttaagcatttcgaaataaagggagtagggagaaatctttattccctttattcattactgtattaatagcagtagttaggagagctttaactgctgcttttttattaaaacccaaaagtaaaaaaaataattacatagtgttatagattactataatttttaataaagaaagggaccgtacatataaaatgatacctatagactggacacatgaaaaaaagtgtttagtctgtaggtgtttttttatataatagaaataacaacggaggatgaacatgagtaagattttatttactaaagaggacattataaacttaaagaaaaatgttaatattcttagagttagtgaacgctcaataacatatacagatgaattcaaaagactctttattgaagaatacacatctggcaaactgcctagagaaatatttgctgaaaatggatttgatattaatataatagggttgaaaagaattgaacaatcagctgctagatggaagactttatatgacaaagatggaattttaggattagatgatagccgaaagcgcactagcgggcgtcctcgttcaagagaattgagtaaagaagaaataatcgaaagacaagaagcaaaaataaagttgcttgaatcgcaggtagaactgctaaaaaaattagacgtgacagaaaggttgttgataaacaaaagtaagaatctaaaaacttctgatatatttaaattaatacatattacaataaaagaaaacaaatttaaaaacttaacaggatatttctgtgagctgttagctgtttcacgatcgggattttacaattatattaattcaaaagaaaatagaatagctcgtgaaaagaatgatttaaaagccaagaatattatcctaaaagcatttaatcgccgtggatataagaaaggttctcgctctataaaaatgattttagagaatgaatttaatacagtttatagtcttaagaaaatacaaagaataatgaagaagtataatattatatgtccccatagaaaagcaaacccatataagcagatggccaaagctactaaagagcatagaacattccctaatattttagaaagaaacttcaaacaagagatacctggaaaagtattactaactgacattacatacttgccatacaaatgattttagagaatgaatttaatacagtttatagtcttaagaaaatacaaagaataatgaagaagtataatattatatgtccccatagaaaagcaaacccatataagcagatggccaaagctactaaagagcatagaacattccctaatattttagaaagaaacttcaaacaagagatacctggaaaagtattactaactgacattacatacttgccatacaacggaaacaatatggcctatttatcgaccattctggacgcatcaactggtgaggtattagctcatcacatatctaaaagaattacaattgatatagcaactgaaacaattggtaaactaatgaagcagtgaagagtcaagttgcatgaaaatgccttcgtccattccgatcagggatgccattatacaagtcctatttttcaagatttattaaagaaaagacgcttaggacagtcaatgtcacgacgtggaaactgttgggacaatgcacctcaagaatcttttttcggacacttaaaagattctgttaaaacaaaaatatgcaaaacttttgaggagcttaaaaggaaaatagacaagtatataatatattataacaattataggtataaatgggatttgaaaaagatgactcctgttcaatacagaaaccatcttttatgcgcttaacactcttttttatattgtccttgacataggtatcagattaataaagtacaaccccttttaagtatatatacatatacggaccaagaatacccaaccactattattatattggaaattctaagaaaaagaacaaagtatattaattttatatagcgaaatcttacattttagttattaattaatatttctcatagcaaataaaattttagtaataaaataggatgaaatttgataaactattaggatggtaaaaggagaaatatagaaatgtataacttatatgtaagaaaaataattacggctattatagaaagtgattataaaactataatggtttataagagtagattagcagatgaagaaataaatttaataaatgaaattgcatgtgaatacagaaaaacaattatttttgcatttgtgaaagatatcatttttaatactgatgaaactatattgattatagaataatagttttatcatcattaaaagggtaatatatatgataaaaaatttattatatggaacaaaagacagcaaactattaattaatttactgtcttttggcaacctgccaagctataaaagattagcaattatagtattagtaaattaccaatatttatactatggattatttgggatttatgtaatataatatctcataataacatcaaggtggtgattttattatgaaagatgtaactatagatacaatcaaagatacaataagagatcttccagaaggggaacaagaagtaatattatacttaacagaaatatttaaaggtgaagaagagactattaatgagtatattaagaatgaattaatagatagataatatggaactttttatattagtatgataaaatgatagagatccattgaaaaaaacaaaagtacatacaagaaatgcagcctttgagttggctgtattttcatttatatcataatatagaagaaggtttaattaatatagattattctataatggtatgttattatgattatatccactctattgtcaacaaacaccaataaagggtagattaagtaaaaatacttagtctaccctttattttacaccaaaatagagatagcgaaagaatcaggtgcatgacagtaaagctatctcttttttatgtttaaatccatagattggagcagttatattattagcataacattaagattatatacattgattataagaaaacaaaaaagcagtagtattattaatgaggataaattaaaaaactgactatactggaaaagttgaatggtgacattaaatagagtaatagttacttattttcatgataatatgcttatataccataaaccctaaagcatacatataaaaatgcagccattgattcgaccgcattttttgtcactatttactttattgaaatataatggtaaaatgtgaaagtaagtattttaatatatctatatgtcaatagcagcaggcaagttttttgtttgttgctatttgattttgcagaactgttcagttaaaagatacttaattcagaataaaaaatacaaaaagagatagcaggggaaacggagaactgctatctctttatatatttaaatttggacatttatattatttctaaataattaaaaaatattcactgaaattaatacatactaacaataaaattactaccaaatttatcctaatatgactttcttttataatacagctaataatttagatcttattatatttgacaaagttaccaaataatatacaattatatttagaagaacatttagggggaataataatgaaaaaaatacttagtattttattatgcagcttattactatttactatagtaggttgtgggagctcagcaaagaaatatacagctgaagaatatggaaataagctaaaagatgctggagttactattgagaatatggaagtcacaactaccgaaaatgataaaaatcagttgttgggtagaccaaatcaatatacatctaaagtaacttttaccaatggtagcatagaggtatttgctaataaggaagacgccactaatagaaaagaatacattgataatattggtaagaaaatgcctttagtagctgaatataactacgtaaatgatacaggagcattattaagacttgataaaaaattaaatccagatgaggctaaaaaatatgaagatgcatttatgaaaattaaataatattctatatgctaggattaatttcctagctttatttttatgtataaaaatattttgaaataattaaaaaagcggcagccgtagctgccaccagtccattttgcataattagtataactcaaatttattaataaggtcaagaagagagatatgtagttgttttattaatattacttgtattaaaggggggaaatgtttatgtctaattttagtattaatgataatccatttgggatgatattaattatctttccactacttacatttattatatctctaattttacaacttttaattaagaaaaaagtaattgttttaagcattatttttatatggtatttaattgctacatttgttttatttaatacaacttttctaatatggtgttttgtttatacgggtatatcattagttggaacatttagtgcagatttaattcttaaacataagagataacttactttataattcttttataaatagtagatatattacaatcagtaatacttatattaattaattttcacaaaacaccataatttacttgatattatcaatatgtatattaaaggaattttggagaaaatgtagaaataaggttatgaaaagataaaatttaagggggatgttttaatgaaaaactttaagagattgatagctagttttgttacattaataacaatattagcagcaacgccattagcagcacatgcagaatggaaaaataattctacaggatggtggtatactgaaggaaactcatgggctactggatggagatacatagatggaaattggtattatttctattctaatggttacatggctaaaaattgttatattggagattattatttacgtggagatggagcgtggacaactcctccttcagatagcagcagtagtagtggaagtacagcaagcaatactaatactagtaacgaccaaagtcaaacagtatatgtatcaaagaatggtatatatcattcaagtccaaatgcacatggtatgaaatattatactactatgtctttagctgatgctcaaaaggcaggggatagagcttgtgaaaaatgttattaatataataaaggataatatataaaaaaatagaggtagtactaaatgtttttgagtactatcctctatttttattaggtggaatcaattatgctttcttcaataaataattattgacacaatatagaaagaatatacaataatagtagacaaagggggattaaaatgacaaaaactaaaaaaatcattagcttattactaactttattattttcattgtttctaatatcatgtggtaagagctcacaagtcaataatactaataatacagcagctactgcagaaacaaaaatagaaactcaaaaaactttaggagatttaaagatacattatatagatgttggtcagggagattcagaattaattcaagttgatggaaagaacattctaattgacgcaggaactagtgataagaaggctttagattatcttaaatcaattggagtcactacaatagattatgcaattgctactcatccacatgaagaccatattggaagtatggatgatgttatcaataatttaaaagttggaactttttatgcacctaaagcaacaacaacaactaagacatttgagaatatggtagatgctttaaaaaacaaaaacttgaaaatgaatgtaccaaaagtaggagatcaaattacggtaggagacgcaacattaacatttttagctcctaatagtgctaagtatgaagatttaaataattattctattgtctgcaaattaaaatacggtaataattcatttatatttatgggagatgcggaagatgtaagtgagggggagatactacaaaaacaattagatatacaggctgatgttctaaaggttgggcatcacggaagtcattcgtctacaactcaagcatttttagataaagtaaaccctaaatatgcagttataagttgtgaaaaaggtaatgattatggacacccacacgaagaaactttagataaactaaatgctaaaaatattaatgtatttagaacagatttagagggaacagtaatagcaacaagtgatggaacaaatataacattcaatgttaagccagttgataaggctaatgacatagctcctaaaaaaactaataaaaaagataattaaatttataaatcagtagtcattatgtctgctgattttttatatccatatattaatattctataaaataaatacaaatataattatgggaaaatcattaagtttctatcatttcatttcgataatttgcattatgtaataatatattttctggataaaaacatatgaatttaaagaaaataaatgattatatggaaaaagtaagaggaaaattttctttacaagataacgaaggttaaatataatatatttatgagaacgtatgtttgcataagacgtggattttattaaaggaatcgagaaaatattgaacttaagtatggtagaaggatgtaagtggatactatttaaaatatggtaaagtttatttttctaataatgttgtgataaaaggaatgatagctatggtaataaaagataaagaattagatataaatttagtaagtgctgtggagaaatatttaaaactaaattacagtgatctatataataagaataatttaggaatagtatttgaagaagctaaggaagatgatgaacttaagttaaaaatatttaattcaataagaagatttataatgaattaacgtaaaaagatatttaataacaaattatcattagaaattatatattatgttaaaatcaaattgaagatttagagttttcttagaaatcacccaataacgtaatgtgatattttatatcagtattcgttattgggataagtatatagaaatttttatagtaaataaatttataattcctggtataggagatgacacatatgataagaatttgtttatctagagtattaggggaaaaaagatggactcaagcttatttggctaaaaaaactgaaataaggcctaatactatttcggaactttatcatgaattaaataatagggtgaatttagatcatattgataaaatatgtgaagtggtaggatgtgatcttacagatatattaaaatacgaacctaataaaaagaaaaccgattaattcgtattgcgaaagtattggttaattagtaaatctcttgtatttagataatacgagagattttttagtttgaatttataacgttagatttgtattttgaaattcgtaaaatttgtacaacacgaacattaattctaatatgcatcatatgaagattgaataatgaggtccataaaatagtagttagatacaaaatatggtataatatcctaatatagcagaggtaataggatagaaggagtataaaatatgaatgaactatatttaatgcaattagattatttattaaggctctttattgctgcaatatgtgggatggctattggatatgaaagaaagaatcgaatgaaagaggctggaattagaacacattttattgtagctataggggcagcacttataatgattatatcgaaatatggatttcaagatcagataggatggctcaatatgtctcttgatccatcacgtatagcagctcaggttgtcacaggagttggattccttggtgcagggataatttttatgcaaaaacaaacaatagtaggattaacaacggcagcaggagtttgggctacagctgctataggtttagctataggttctggactttattttgttgggatagcagctactgctattactatattgggacaaatacttttgcatggtaaaattaaatttttatcatctccaaggacagagtcattagcgttgcagattgtggatgagccagatgctattaaatttcttcaagaaatatttgaagataatgagataactataattaatttaaagagcaaaagagatgaaaaatccttattaattgatttgaaaatagtgataagaatatatgaatcatttaatataattaaattcttgaatatattgcaaagtaaagattttgtaaagtctttagaattttaagggaaaataaattgtgctaataaagaataaatttaatgaaaataatggatataaaaataccgtagtattcaaaaatgaatttgcggtattttttatagtttaaatattatttaacactatgaacgtatgcaaatttgtgttcagtgtatatttaaaaatttctaaaattacatatttagaaaaactttatatttttatacgcttaaaattaataataaaatgttatagtatttcttattttgttactcttccacataatattaagtgttcattaatgaattattaaacacttagacaataaagagcataatataatcataagttaatttatgaacgggggaatattaatggagaattggaccattgaagaattacaagaacgaattagtttatataaagataaaatagagttactaaccaaagataatgttagactatataacgaaatagaagaaataaaagttgatacaaatgttattagttccaaggaatatgatattctattagataatatggaattattaaaatccgaacttgaaaagtataagaatttatattttcgcgaaaaacagaaaagtaaagttcatatagtaaagaagtcaaaaattgttggaagaaaacctgtatcggatgaattaagaaataaagtattggatttaaaaaagcaaggatcaaatataaggagcattgctaaggaattgaatattgcgcttggtattgttcacaaaataattaatgaacaaaaatgataagtgaaatatctatacaatgctaaaatagaatgtatgaaaaggagcatatcaggataattaaaaattatcttaatatactcctttttgttttatttttctaattaaattaccataaaagtctaaatataaattttcctacattataatataagaaatttaatcaagataatttttaggaagattgaatgctttaattattttcctctttgatggcaaacttggattaaaaattcctctttcccattgaccaacggtgattacttttcgattgacctttttaccgaattcaatctgggaaagtccgctaagatatctaagtttacgaattctgtttgttatattatcttcaaggtcattaaaaatagcattagctgaaaattccctataattaacagtaaatagctcaaatacacttctaaatattgcacttttatacaggttgcaaccggttctggtaaaactactacaatctacacaatattgaaggaaatcgattccaaggctttaaatataacgactttggaagatccagttgagatagtcatgcctaatatcaaccaaatgagtctaaataaaaaattggacatagatttttcgaatggccttagaagtatattgagacaggacccagatgtgattatgattggagagataagagatgaagagactgctagcatggcggtaagagcatcgattactgggcataaagtatatagcactattcactgtaaatcagcaagggaagtttatataagattagaaaatatggggatcaaaccatatctattgagtgatgcgctagttggaataatatcacaaagattagttaagattttatgtgatgattgtaagaatatagatgatgaaaattcagtgaatggaaagatattatataaaaaatgtggctgtaaaatgtgtaattattcagggtatgcaggaagacaaataatcagttcggttcacttcttacaggacaatagtgaaaaaaggatgatggatttatataaggatagcaaatacctatcaaatgaaaatatgaagaaagatttggaagaactattacttcagggaaagatatctaatagtgattatatagaatttatagaaggggaaagattgaatgaatagtaatgattcggaaaattcaacttatagaggatttaaaaatataacatgccttagctttaaaaaaagaataaagtttaaacataaagtaaatgaagaacaactggcattaatatcgggaagtttagcacagatttataaagatggaataagaataactgaagcgttagatttagtagctgatatattatcaagtaagatctataaggatagtttatatggagttttagagctaataaaacaaggtagtagtttgtcgcaaggattttcagagtttaaagacctatatccagaattttttataggaataatttcgatcggcgaaaatactggaaaactatatgaggtgctgaagggattaagtgtctattatgataaatcgctatttattaagaaagaaatcaaaaatgcatgtatttatccaatgtttatatttatttcaatgatattactcagtatatttttggtaaacgaagtgattccaaactttttcgaaatttataaatctatgaatatcaaattaccaaaagggtgtcaagttatatatgatatgagtattgcttttaaggacaatcatctggttactggtgtggcaattttttcttggagtttaatattaataattcttatgaaatgtttatctaatcaaattagcataaataaactaacgaaagtaagtatagtaagatctttctttgagtatataatggtattgcttttttctataataacaagtactggaataaacatttcacaggctcttaaatattgtgaaaatagtatgagttttatctatttacgaaataaaattactgaaataaattcaaatattataagcggggaaactctaacagagtcgttagagaaaagtggagtcttttcaaaatatgcgttagctattgtaaggattagagaggaaggtggaacaatagaagaaggttttaaagaattagccaatactctagaatatagacttaatgagaaaatacaaaaatatttaaaaatgataaacccgattttcataattatgatggcaagcttcataactctatttctactgatatttgtccttccgttgtttaataatcttaagggtggaataagaaaatgagaagcgatggattcactttaatagaaactatggtaagtgtttttatactaacaattttacttagtgtaggaatatcattaagtaaatttgctcggaatgtatcaaaaaatatggacaattcggaatatatttatgagattcaaaatttactttcatatggcaaagcggtttgtagagaaaggaataactatggaaaaataactgtaatggcaagtaaaaatgaaattaaatttatagatggatgggatagtatagagaagactgtatgtattccgaaggaaataaaaatcattagtggagatataaatatattggtaacgccagatgggaaaatatctagggggaatacaataaagataatagataattgcggtgtaaagcaggatataacgataggcgttggagtggatttgattagtataaagaatggtgaagcaatatgaaaaagcagggcagtatattaattgaaacattagcgtctgcaatgattttaactttgactgctacatttattataagtacgagcatagaaaattctaatatactaagggaaagaattttacaagaagaagtcgatagggcaataagtaatttggaaaatgaattaaaatacaatacatcaaatgaagaaatgcatgaaatgttagaaaataaaattggatttaaatataatggggattttagtagagaattaacatataaaaatctagatgaattagaagatggtgaagacattaagttaaacaaaataagtgaggatgacattggcttgaatttagaaatagtagctaacattaaggttggaaaaaatgaagtgaatgtggaaaaaaagtttactaaaagttggtggatggatgaagtataaaataggatacgtttttaaaaagaagagaggatttactattattgaatcattagcgtatatttttttaacaacaatgattttagcatccggaataagtttgtttacatcaatgtatagagcgtatttagaatcaattcagttaagcataaattataataactatcaaaatttttttatagatttagataatattataagtgaagggggaattaaggagataacagttaataataaccaaattaaatttttaaagaatgatgaattcaacagtatggataaaataattaaatcttatgaaggaaaagtttttataaaatatacaagaaatgatgtcacacaaacgataaatactatgcttgaagatatagacaatcttgaaattaagggaaaaggaaaattaatttattttatactacatgacaaagatgggagggaatttattaagtgcatttgaagaaaaaaggaactgtattaataagtactatgatagtattatccttaatgagcattctagggtgttttatgtttaaaatgatgaaaaacaacaatgaactaagctgtttatacaattttgataaagataggtatgatttgaattcaaatgaggagcaagtgttaaataagtttatgatagagattaatagagagaaagtaaatagtgagaaactgaatgaagatatgttttcagaaaactttaataaaaaaatagatgataatataatcgaatacaataaagataataataaacttctattaacaacttacaaagaagatgatgtaataagaaaaagatcaattatttacagttttaagggggaaaaaataattttaattccaacgtataattttgatgactatgacaaatagcatctatgataatgtgaataattataaaagcatttagactaagagtttataaaagaggtatttaatgagaaaatcaataatatttattaaaaaaaattattgcacatatgatggaaaaaaatatgattttaatgaatttagagaattaagtggtttattaacttcaaatataaaggtggtaatacttcaagaagaattatttgtgagccattttgagaatgctgtaagaagatgtaaattatgcaactttgtagattcaaaaattagaaatgattttcctcaaaatggagatatactatatgattttgagaaaaggggaaatataatttcaatatactcgataaaggggtctaagagagttgaaaaagtagtggagaaggcaataaatatagaaattaagccaattcaatttataataaaagatgctttgatgaaaatagttagagataataatagaaattttaaagcactaataaaatatgatacatgctattattatgtatcatttagggatagattatatcatgatggatttgtttctgaaaataaacatattgttgaagagagccttttaaagaaaggtgatctcgaaggaatatacgttgatgacaatactgttgatattatttcagacaataataaatctaaggctaaaaaagtgaatataggagaatttataaatgaaaatatatacgaaaaacaaagatttcattccagaaagattttttaacaaggctgaaatgaacacaattagaaaggagaataaagtaataatattatttttaattattaacttaattgcttttccgtttgtagttcaaaatataagtgaaactaaagaaagttctaaattaaatagaaatagtaacctagaagaaggtaagattaagtttgaagatattagcatttgggtaaaaaatttaatgaaagacaatattgaagaggcacacataactaataatggcggggatataatagtaaataatttaagtgatatagatgagttaagttccaatggttttatagaaatacatgatatgaatttaaatgataatgaaaaatataaactaggagtaagcttatatgaatagactactcaagcatataattttaagcataatgataatattagcctttacgcaaatactatgtataaataatataaaaaaagctaataatatcaaagtatacaattatcaaaataaattttacgatcataaaactttaaaacaaattaacagagatttagattgcttaaatgaaaagaatattctttctgctaatgaaaaagacggtaaatggtatgtgaaaataaaaatatccggtagtaaagatgatctattaaatgagttgcctaaattaaaaaattatgatgtgaataactatattatagataaaaataaggacgaaacctctattatattagatataagcactaaggaaagtgtttaaaaggttataaaattataaaattttactggaaaataatcagaaagattgcaattatcattgtcttttgataaaatatgagtgttatgtcaacgattaagtatattagcttaatatttgaaaaaagttacgcggtaattaggcatattaaaaaaaaataacaagtcattatgatagtctgttttgtataatactaaagtaatatatttactgaataatatattactttgatgtaatgttgtttatttagtaacaaaaagaatacagaacatcttagaggtgttatttattatatgtcttattttataaatttggagggatctttaatgataacagcaggagatataagaaaaggaacaacgtttgaattggatggacaagtatttacagtagtagaatttttacatgttaagccaggtaaaggagcagcattcgtaagaactaaacttagaaatgtaatttcaggtggagttacagatacaacattcaacccaactacaaaattacaagaagcagtaattgaaagaaaagaaatgcaatatctttattcagatggagaattatattacttcatggatcaagaaacatatgagcaaattcctttaaactatgaaaaagttgaagatgcaataagattcttaaaagaaaatatgtttgcaacaataaaattctttaaaggtgatgcattctcagtagaagctccaaactttgttgaattattaataacacaatctgaaccaggtgttaaaggaaacactgctactaatgcaatgaaaccagctacacttgaaacaggtgcgatagttaatgttcctatgtttgttaatgaaggtgatgttataagagtagacactagaactggcgaatacatggaaagagtttaagctatatagttgctaagcgagaagcttagcaactttattttatatttaatctcaacatttttacaaataaagagaaggaagtgaaaagatatggaagagcttagcaaagagattgaagctttaaaaaagaatttatctaaaatagaaaataaggattataaagaatgttttgataatgtatattctattttagaagttatgaatcaaagaatagaagagttgactgtaaatcaagaaacattggaagaaaatattagatttatggatgatgatttatcaaatattcaagatgaactatttgaagagatgtctatagatgaattaaatgatatcgaagatgaatatacggaaataaactgtattcattgtaataaaccaatttttattgaacaatctaccctaagcaataacgaagaaattccatgtccttattgtaaaaagaatataaaaggataattaattattaaatatataaataaaatggctatcttaaagttaaatttaagatagccattttttaatttacatatttttattataattcagtaatattttggggagatattaaatattaattaattaagagaacgatggaggaggcagtggagttttgattggtgaagaagagatagtaggaatttttccagctaaaataggcaatttacttaaggataggcttaataaagaacaggtatatgagcttagaattaaaattgggaaaccaattttggtttactcaaaatatggagaaagtattattaattatatttctacaaaggaagatatgaaaagtattatgcaaaaagtttccaattattcattatatgcctatgaagaagatataaggcaaggatttataacaattaaaggtggacataggatcggcatagctggtgaatgtgtaatggaaaagggtgaagtaaagactataagaaatatttcatctgtaaatataagaatttgcagagaagtaattggatgttcaaataaggttatgaaatatattatatcagcatataaagtttataatactataataatttctccacctaaatgtggaaagacaacaattttacgagacatagctagaaatatatcaagtggaatgccatcattggggattgctggtaagaaggtggctgtgatagatgaacgaagtgaaataggagcctgttattttggaattcctcaaagcgatttaggaatcagaacagatgtattagataactgtttaaaaagagaagggttaatcatggcaattagaagtctttctccggaagtgctaatttgcgatgaaataggcactaaaggagatatagaagcacttattatggcgttcaattctggcgtaaatataataacaactattcatggttttacgatagaagatctatataagagaagggttcttagtgacttattagataatgagattttggaaagagtaataatattaagtaatagaaatggcattggaacagttgaaaatgtgtatagcataaaaggaggtgagagtatgtgcttaaattaattcttatagtatgcatatttattataagcacatatataggatttgcatatggagaaactttcaagaaaaggcaggagcagcttaaagagatattgaaatctttaacaattctccaaaatgatatagtttatggaacaactcctttgcctgaagctttagaaaatttatcacataaagtgtgcaagcctctgagcaattttattgaattagtggttaatagattactaaaagggaatgtagaaagcgtatatgaagcagcattagaggagtttgaagtgttggaaaatgaattttatcttgaacgtgatgacagaaagataatgtcagatttttttaagtctcttggagaatcaggtgtttatggacaagaaaaaatattcttattggcgattgaaggaataaaaataaatctaagtgatgcagaggaaaatgcaaagaagaatacaaagctttatagatatcttggagtatgtttgggagcaatgataatcatatttatgatatgaggtcattataaataatttataatagctaaaataattatactaaataaggattggaggaagataaatgcatgatataactatactttttaaaattggaggagctgggatacttttagtagtattagataaggttcttactagcagtggaaaaggtgagattgcagctataacaaatattgcaggagttgtaataattctgcttatgatagtttcgatcataggagatttatttagtactgttaaaactatgtttgtaatgtaggtatgcagattatgttaatagtaaaaattgtaggcatagcgtttataacattatttattatgctattattcaagcaatctaaaaatgaattaaatacattccttgttctaactgcgggtgcattaattcttcttattatgatagagccacttagacaagtgatagactttgtaaaagaaattgcagataaagccaatattgatatggtctatattggaatagtactcaagattttggctatagcatatatagcatcattttcaagtgcgttatgtaaggatgctaatgccgatagtcttgcgactcaaatagatttatcaggtaaaataatgattttagtactagcaattccgatacttatggcagtattaaattctatattgcagataatgtaggtgtttatatatgaagatgataaaaagagttacgtttatagtattaatgagccttatgattaacatatttatttcggctgtgccaggtgattcttttattggatcgagaactatttatgcggcagaagtaaataataaagttgatattgaaacaggtaataacacaaacttttatgataagaataaaagtaaacaatcttctgaaaatgaagttaacatagatgaattagggggaagtgcgaaagaagaaattaattcgctatatgaatatataagcaaaatgaaaacagatgttgagctcatgaacaatttaaatccagttgaatatgtcaaaacttatatcaaagaaggtaaagggaatctttcaattgatacacttctaaaagcagcattaagcataatatttaaagaagtgaaaagtgtattatctttagtaatatcaatagttacaatagcaataatatgttcactactaaaaaatctacaagatgcattttcaggtgaaagtatatcccaagtagcattttatgcatgctacgccttaataataatggtgttatcaaagagttttataatttcaatttcagttgctaaagatgtaataaataatatttcagattttatgaatgcgcttctccctattcttgtgactatgatttctcttgctggaggaatagcagcggctactacattagatcctatagtacttggtgcagttgtatttatacctaaagtttattccaatgtgataattccaatgatattaatgggatttgtattagaatttgcgaataacatatcagcagagcataaaataaataatttgtgtaagttgtttaagcaaatcatcatatggtttcagggaatcatagtaacaatttttataggattattaacgattagagggattacatcaactacgattgatgcagtaacactaaagacggcaaaattcgctgtagacaactttattcctattgttggaaaagccttttcggatgcgattacttctgttgctggatattcacttataataaaaaacgctataagttcaatagggttagttgtaattatcttaattctcttacacccccttattaagttagttcttatagagtttatatataaattatcagcggcattaatagaaccaataagcgattctagaataacgaagtcattggaggcagcgggaagttccatgatgcttataatatcatgtgtattaactgtaagctttatgttttttatattaataggtatcatggcatccactggtaggtttatagttggaggataaaataatatgtttatggaagctttaaaaaaatttgtaattacccttgtgactgttcttatatttatgagcgctgtagagatgattgctcctagtaagatgaagaaatatataaaatttgtcttgggattaatactaataacaattatattaaatccaatattgcaaattgtagaaggtggagaaaaaaactttacagatgtcattaataattatgaacaagtattttcaaaagatagagatacagctaattttgacggtataaatacattaagcaaaagtaatacagatgatgagagaaaaaaagcattcgtagccaactttaataaaaattgtgataacattttaaaaaataatttcaaagacatgaattttaagagcgaagttgattgcgatgtggattttagtaaagtagctataaatgtaaagaaacttaggataggtgtaagtagtaataaaataaataaaataaaaaaaatagtaataagcaaaggtgcagatgaaaataacgaagggaaaaatgcagaatacagtgaaataactgattttgcaagcaatgaattaaacattccaaaggagaaaatagaagtatatggattagaggagtaggaggtatatatatggataaagataaatttaaaaaagaatttagcaaaatactagagcagaaaaagatgaaaagtcttatagcagtttgtataatacttgcatttatacttattgctatgaatgtattttcatctggcaacaataattttagcagcaataaactatcatctaccgcagctaaaacaaatgcagaaaatgtagatgatactaaaataaataatgaatcagatgaaaaaaattatgaagaaaaacaaaaaaatgatttaaaaaacatattaaagaaaatgaatggagttggtgatgttgaggtaatgatgtcttttgaaaatgggggagaaaaagttccggcgtatgataataataatcaaaagtcaactacagaggaaaatgataccgagggtggaaaaagagttacaaatcaagacacagatacgtcaaaaactgtaatgacaacatctgatgggaataatgaaccatttattttgaaaacctataagcctaaaatcactgggataataatacttgcagaaggtgctgacaatagcaagataaaatatggaatagaacaagctgtgtcaaaactatataacttaagtttagataaggttaatgtatatagcatgaagaagtagcatataattttatagaaaaagaatgggaggaagaatattatgacaaagaaacaatgtgggattatatttacattattagcattaatattatgtgtaggaatgctagcagcaaaacttaataacggagggctaaatgatccaacagatttaagccaggttttatctactgatcaatcaaaaactgaacaagatacacaggctttaagtcaacaaaattatttttatgatgcgcgaagcgaaagagatcagcaggattcaactacaatacaaactttaaattcaataatttcagatgcaaatacatcaaaggagcaaaaggatcaagcaacaaaagagttaacacaaaaaacaatgacaaaagatagtgaaggaagaatagaattaagtatcaaaaataaaggctatgaggatgctttatgtatgttacaatcagataaagcaacagtaattgttaaatcacctaatgaacttcaagaaagtgaaactgtggctatacaagaaatagttcaagagatatcaaaaattaaagacgtaataatacaagtacaaaaatagtataaaaaccataatatatttgtaatgttaaattatatttgatataatgaacacaagattatcatgttttgttatcacaaaacctaggaggttaaagtaacatggaagatttagttagagaagaaaatatcggagtagttaaaatttctgatgaggtagtaagcgttattgcaggaattgctgctcaggagattgatggaatattagatgctcaaatgggtgttgcaaacaacttaacaaacatatttaaaggtaaaaagaacaccgctaaagcaagtaaagttactctagaagaagataaagcaattatagatatgaacgtatcagttgaatatggtaaaaaaataatggaagttgtgcctcaggtgcaagataatgttaagaaaaccgtggaagctatgacgggactatatgttgaagccgttaatatctatgttcagaatatttatatatcaaaaaaggaagaaagtgaatctaactagtttgattttcaccctctgaagctttcagagggtgtttctatgctgaaattaaccaaggtttaaaagaaagcaaaagtgtgtataatgataaatgtacataattaactatgatacatatttaggaggaatatatgaacagaaaattatcaagggaaaaggctatggagttactatttggaatgactttgagcaaagatacaatggaagatgcagtggaagcatttgtagagaattatgaaggggatataaaagagattgacttaacatatgtaaaacaagtgttaattggtgtaaacaataacaaagaagcaattgacaaagttatacaagagaatttacataactggaaaattgaaagaatatctaaagttaatttaagcattttaagaattgcaacatacgaattattatatgataaggaagtaccaagaggtgttgcaatcaacgaagctttagaaattacaagaagatattcagatgaaaaaagtgtatcgtttataaacggagtactagataagattaagcaggactaatttttatatactaatacagtttaaatatacatgatttataatttaattatgtttagaatatttgcaataaagatacttaaaattatataaaataggattacaaagtgaaagtaggtagaatgataaaatggggcaaattattaatggtaaagaagttgcattaaaagtgaaagaagaaataaaaaattttgttaataatagaaaagaaaaaaatcttcaagttcctaaaattgcatcaatattagttggaaatgatggtggatctatttattatatgggcagtcaagagaaagtagctaattctcttggagttgagtttctaaaattaactttaccagaaacttgcaatgacgaagatgttatagcagaaataaataaattaaatgaagataataatattcatggaattattctacagttgccacttccgaataattttgatgaaaagaaaattatcaagcaaatatctcctaataaggatattgattgtcttacatttgagagtcaaggaaaactatatatgggagagccaaaatttttaccttgtacacctaattcagtaattaccttaattaaaagtctaaacatagatattgtagggaagaatgttgtagtccttggaagaagcaacatagttggaaagccagtagctcagcttttattgaatgaaaatgcaacagttacaatttgtcattcaaaaactaagaatctcagagaagtttgcaagaatgcagatattttagtagtagctataggaagaccaaaattcattgatgaaacatacgtaaatgaaaatgcgattgtaatagatgttggaacatcatcttttgagggtaaaataactggagatgtagattttgataaggtaatagataaatgtagatatttaactccagttccaggtggggttggctcgttaacaactactttattaataaaaaatgcatgtgaggctttacaggaaaatgaatattaagactttaactgtttcagaggtcacaaattatataaaaagaatgttagacaatgactttatcttaagtaatctctctgtaaaaggggagatttctaatttgaagtatcatagtagtgggcatatttactttacgcttaaagatagtagtggcaggataaattgcgttatgtttaaaagtaatgcagtattattagattttccattagaagaaggaatggaagttattattaaaggtagggcatcaatatatcctgccactggaagcttccaactttattgtgatgagataagaaaagaaggattaggagatttattcattaaatttgagaaacttaaagaaaaactatctaaagaaggatattttgatgaagcatataaaaaggaattaccaaagtatcctcagagaataggaatagttacatcgccaacaggagcggcaataagagatattataaatgtttcaactagaagaagcagtcttgtggatgtagtcctatatccggcaaaagtacaaggttcaggtgcctacaaggatatcatttctggaattaattattttaatagaaagaaatcagtagatataattatagtaggcagaggcggaggttccatagaggaattatggaattttaatgaagaggagttggctaaggcgattttcaactctaaaatacccataatttcagcagtagggcatgagatagattttacgatttgtgattttgtagcagatgtcagggcagcaacaccttctcaaggagccgagattgctgttccgcttagtgataatataaaagatagattactagatatttcaaagaatttagataagtatataagtgatagattagatacttgtagaaataatttatcaggagctcaaagaattttaaaggttcattctccgatggctaaaatatctaattcatatttagaagtggatagattacaagataggttgaattttgcaatgagaacgaaaattaaaggagaaaagaacaaagtagaaaatttaaataatttgctttttgctcataatccaattaaggtaatttcaaaaggatatgctataataaaagataatgaaaacaatattattacatcgaaagaacagctaaatgaagataaaaatatagaagttattcttaaagatggtaatatagaaggaaaattcataccatcaaaatgaggagtttgagatatggctaaaaaagaaagttatgaagaaatgttaactaaacttcaagatatattaagcaatttagaaacagatgacttgaatcttgaggaatctatgaaatcttatgaagaaggtgttaaacttgtaaataagatttataagattttagattcctatgaagctaaaatttctataattaaagatgataaagaattggagtttagtgaagattatggagataaataatttaaaaaaagatattaatgaatatttggaaaattacttcagtgaaaaaggaagttttaatagaattatatatgattcatgtagctatagtttgaatataggcggaaaaagaatacgaccaatattgctttcgctaacttattatatatacaaagaagattataggaaagttataccaatggcggctgctatggaaatgattcatacatattcattaattcacgatgaccttccttgtatggataatgacgatttaagaagaggaaaaccaacaaatcatattaaatttcaggaaaatatagcggttcttgcaggagatgctttattaaatgaagctatgataataatgatggattatgcactaaaaagtgaaaacaatgctttgagagcggcacatgagatagcagttgcggcaggcgcagaaggtatgataggaggtcaagtagtagatattatttcagaaggaaagaagatatcgcaagatgagttagaatatatgcatgctaaaaaaacaggtgcacttattagagcagcaatagtttcaggagcaattttagctgaagcgcctgaagatgatttgagattattaagagaatatggtgaaaagctagggcttgtttttcaaataaaagatgatatattagacgttattggagatagtaatgtattaggtaaaaatatacatgcagatgaagaacataataaaacaaattttatatcggtttttggattagataagtgtaaagaactatgcgaaactttaactaaagaatgcatatctattcttaaaagtttgagtgttaattcagattgcttagttgaacttacatatactcttttaaacagagaaaattaatagagggaatgattgttatgaacttactggataaattaaattttccagaagatttaaaaaagcttaatgaagaagattataaagttttaagtagtgagattagaaaatttttaatagatagtgtatctaaaactggtggccatttagcatctaatttaggggttgttgaattaacattaagtttatttaaagcctttagttttgataaagataaaatagtatgggatgtaggacatcagagttatatttacaaaattttgactggaagaaaagaaggatttaaaaagcttaggaaatatgatggaataagtggatttcctaagagaaatgaaagtaaatatgattattttgacacaggccatagtagtacttcaatatcagcagctcttggaattgcaagggcaagagatttaaagaaagaaaaatataatgttatctctgttataggtgatggtgcgctaacaggtggaatggcaatcgaggctctaaatgatgttgggtttagaaaaacaaaattaataattatattaaatgataaccagatgtcaatttcaacaaatgtcggaggattatcacgatatttaaataaacttagaatagctccagtatacaataagttaaagactgatattcatgcatctttagataactcaaatctaggtaaaaatatagcgggaaaaatatctaaagttaaagatagcataaagcaattaatagttccatctatgttttttgaaaacatgggggtaaaatatattggaccaattgatgggcatgatatcgatgcaatgacagaggtgtttataaaagcaaaagaaataaacgaaccagtaataatacatattttaactcaaaaaggaaaaggttatgcgctagcagaagaaagtccaagtaagtaccatgcggtaggagcatttaatttagaaagcggtgaatcaaatgcatcaccaaagaatagctattcaaaggcatttggaaaggcactagtaaatcttggagctcaagatgaaaaaatagttgcaattacagcagctatgccagaaggtacaggacttaagtgtttttcacagaaatttagagatagattctttgatgttggaatagcagaagaacatgcagttactcttgctgctgggatggcgagtaatggtttaaaacctgttttcgcagtttattcaacatttctacaaagggcgtttgaccaggtattgcatgatgtttgtattcaaaatcttccagtagtatttgcgatagatagagcgggaatagttggagaagacggtgaaactcatcaaggtattaatgatttatcctatttatctatgatccctaatatacatatagttgtaccaaaatgtctagaagaagttgatgttttattaaaatgggcaattaacaaaaatgcgccagttgcaataagatatccaaagggtggaaacataattgatactctttcaccaattaaagaggtagtagaaggacaatgggaaatagtaaatagaggttctaaggtttgtattattgcaactggcaggatggttcaacatgcaatgattgcaaaagaattcctatatgagaaaggattaaatccaacggttattaatgcaacatttgttaagccaattgataaaaaattactagaaaatataaaaaaagaaggatataatattttaacaatagaggataacattataaaaggcggattaggttcagctgtaaaagattatttaagtgaaatagattataaaggaactattagatcacttggatatgatgatgaattcattcctcagggaaatgtagaaatcttgtacaaaacatataaattagattacgagaatataagcaagattgttatgaagctttatgattaaaaggagaaacaaatggcggaaaaaaaagaaagacttgatttacttttagtagaaaagggcataattaattctagagaaaaagcaaaagcttgtataatggaaggtaaagtttatgttgatggccagaaagtagataaggctggtgagaaagtaagttctaatgctaatattgaatatcgaggagaaacccttaagtatgttagcagaggtggacttaaattagaaaaagcaatgaaaacttatagcatatcattagagaataaagtgtgtatggatataggggcatccacaggtggattcactgattgcatgcttcaaaacggtgcttctaaagtgttttctgtagatgttgggtatggacagtttgcatggaaacttagaactgacgaaagagtagtttgtatggaaagaacaaatataagatatgttactctagaagatataggagaacatttagactttgcatctatagatgtatcttttatatcactaaaaaaaataatgcctgcgacaataaatttgctaaaagatgatggagaagttgttgcacttataaagcctcaatttgaagctggacgcgagaaagtaggaaaaaaaggcgttgtaagagagataagcacacataaagaagtagtgcatgatattgtagactttttattacagcaaaacttaaatgttttaggtgtgagtttttctcctattaaagggccagaaggaaatagagaatatttagtgtattttacaaaggataaaaataaaaagagtgattttggaaaagatgatatagatgaagttgttgaaaattcacacatagaaatttaacttccttggaggggctatgaataatattgggattgcaattaatccatcaaaagatgtagataatagaatattgaatatggttgtaaaaaagtttaaggaaaagtttaacttgaaaaatattgaagtttttaattcattcgatatagaagagcagaatttagcagatattgatttgcttatcgtattgggtggagatggtacactccttggaatagctagatctttaaacgatagttttaattcacctatcttagggattaatataggcaatttaggatttttgtcaagtgtagatatatcagatattgatattgctcttgaaaaattgaaagacgggaaatataaatttgttgacagaatgatgttaaattgtaaagttgaatcagatgaaaataaagaagaacttaaggctttaaatgatgtggtactggctagaggaactctttcaagaatggtgaaatttacgatatttgtagatggaaagatatattctacattcaaaggtgatggacttattatagcaacacctactggatctacagcatactcattttcagcaggaggaccatttatatatccggatttagaacttataacaataactcctatatgtcctcatactaaaagtatgcaaactatcgtattaaaaggagacagtgttatagatatatatgcggaccatgaagaagaaaaaatttatttgactgtagatggtcaaaaggctattaaaattaatcatgaaacttcggtaaaggtaagtaaaaataaaaaaagtgtaaaattacttgtatttgatgattatgattattttaaagtcttgagaagtaagattttgaataattctaaagaatgtgatggtgagaaactttgaaatcaaaaaggcatactaaaatattagaaatcataggctcaagagaaatagagacacaagaagagttggcagatgcattaaaaaaagaaggatttgatgtcactcaagcgactgtatctagagatataaagaatttaaagttaataaaaatgcaatcgactaatggtaaatctaaatatgctgtgtctacaggagaacaaaaaaatatcattgatagattaagcaatattttagctaatacagtgctttcagtagaaaatgtagataaaatggttgtaataaaaactataacagggtcggcaccaattacagctgaagctattgataatttggaaagtgcggatattgcaggaacagtagcaggagataatactattttcattttagttagaagtttggaaagtgctgaagatttggttgataaaataagaaaaagaatgtcatcataaatattaagggtgggatgaaatgctaattcaattaaatatcaaaaattttgcgttgatagaagacatgacgataaattttagtgaagggtttaatatactttcaggagaaactggagcaggaaagtccatcatgatagatgcaatcgactttgttcttggtggaaagttctcgaaaaatttaataagaactggtgaagatagaacatatgtagaggcattattttcattagaaaaatcaaaagtttctgaggtattggaagaattagatattgagtatgaagatgtcttaataatttcgagagaaagtcatgcgagtgggaaaaacttgataaaggtaaatgggaaaagtttaattacttcacaacttagaaaaattagagcaaaacttttagatattcatggacaacatgctaatcaagaacttctacaaagaaatactcatatatcatatttagatggatttataggagatgagataatacatcctataggtagatttagcaatttaagggcagatttaataaaaataatagaagaaattaataggatttgtggcaatcaagatagagaaaaattgctagactatcttaaatttcaaattgaagatattgagaaagctaaattaaaaaaggatgaagaagaaactttaaaagaagaatataatattttagcaaatgctgaaaaaattaataatagtttatctatctcatatggaatacttagtggaaacgaagagttaaatgtgattgattccatatcaaagataatgcacgaactatctaatgtagaaaatcattttgaaaagattaagaagaataagcaattaattgaagaagcattttatactttagaagaagctagtcgtgagatccgtgacatggcagaagagattgtttttgatcaagatgcgttggagaaagtaaatgctagaatttatgaaataaatacttacaagaagaaatatgcgccaacaattccagagatcttagattattatgaaaaaataaaaaaagaatataatgaaatattaaattctgaacaaataatagaaagtcttaaggaaaaagagaaagaaattctatctaaaatggaaaaagaagcgttaattcttcatgaactaagagtaagaaaaagtaaattcttagaagaaaaaatattaagagaacttacgtttgttggacttgaaaaatcaagaatggaaataagtatagttcgtcaagaagagtttaatgaaaagggatttgatgatgttagttttttaatatctacaaatccaggagaaccacttatgccgcttgaaaaagtattatcaggtggagaactgtcaagaataatgttagctttaaaatgtgtttttgctgagaaggatgaaataccaacattaatttttgacgaaatagatacaggaataagtggagcagttgcacaaagagttggagaaaagatgtatcaattatcagatacgcatcaagttttatgcataactcatttgccgcagattgctgtattatctgatcatcattattttgttatgaaaaaagttaaagataacaaaacatttacaaagataaaggttttaaaaaaggaagaaaaagaacttgagataagtaaaatgttagcaggagacgatgtaacagaagctacattaaataatgttaaggaaatgataaaattaagtgaactaaaaaagctagaaattcaaaaataaatacatatagaaaataaaattggtaaaaataaaaccatgtaattgcatggttttatttttttatttttataattttggaaatttatatataaagtaaaagaaataaagttatatacttttaaaatttagtataagctaaattttttgactacaataacaaagttcttataggataagacttgagtgcagtgggaaaattaaatttagtaagtaaaggaggagagaaatatgaagagaaaaattttatgtgctactagtttaattatgactccaatccttattctaattttatttaccacgatgagcataaggaaattaccaagtaagatttatacaagagatgaaaagacagtacaatcaattgcacccataggaaacaccataagtaagattggtaataacgataatgagtatgagataaaatttttgggaatgattcctctgaaagctgtcgaagtacaaaaaattaaagatttagagatatgtccaggcggaaatccagtcggagttagagtgaatagtgaaggcgtgattattgttggatattctgaaattgaaatcaataataagaaagaagaaagtcctggtaaggctgctgggcttgaaattggtgatgtaatactaagagtaaatggtgaaaatatggagaattccatggatttattaaaaacaattaaagaatgtgataatgaaagtataaaggttgatattttaagaaatgatgagaatctcacaaaaacaatacatctaaaaaaagaaaataataaagattataaaataggattatggataagagactcaactgcaggagtgggaacaatgactttttttgatccaactactaaaaagttcggagcattaggacatccgataacagatgcagacacaaatgaaccatttctagtaaagaaaggagacttattagagtcatctataataagtgttagaaaaggagaaaaaggatcaccaggtgaattaaaaggaatttttttaaacgaagagacaccaactggaaacattgaaaaaaatacgcaaagtggaattttcggtgaaatcaaaaatactcaagtattaaataataaaattaaacctcttaaagttgggtttagggatgagatatctgtaggaaaagctaaaataattacaacagtagatgagagtggtccacaagaattcgacattgagattgaaaagactttaaatcaatctattccaggatcgaaaagcatggtaataaaaattactgatccaaggctattacaaaaaacaggtggaattgttcagggaatgagtggaagtcctataattcaaaacgataaaatagttggagcggttactcatgtactaataaataaacctgataccggatatggtatttatatagagtggatgcttcaagaagcaggaataataaaataaaaacaaatgatgggtagcgtatttaaaaatcgctacctatatttgcttttgttttgagtttaatataaaattatttgaatttatggaatataaaataaacatagggaaatatagtattaatttatggtgttatattatataaaagtacataattttaaaataattattaatatataatttcgatatagattgtagaaaaagaaatataattatataataaatatgtattcgcttaataattgagaatttaggaaatatatagttacatttttacttaaaaaaatactttaaaagtattttgtcagaacctatttactttctgagaaaaaaagtgtataatttacaaatagtggaagatgataaagtaatattaatcggacttaagagatatttatgtaaaagggaatatattaatagaaaaattactattgcaaatctagacgtacataccctattaatgtcaaggatcttacaataatttgtagaagtaatatattgtgttatattgtacaatgatggaactatttaataagatatggttataggggttaaataatatattaaaatacaaacataataaaagaatggacaaaaggagagaaaaaatatggaagattcaaaaatatctgtactaattgctgatgataacaaagaattttgcagtatattaaatgattatctacttaatcaaaaagatatagttgtcacaggaattgcaaaagatggtagagaggctttggagttaatagtagaaagaaagcctgatttagttattcttgatataattatgccacatttagatggattaggtgttttagaaaaattaaatacaatgcaattggaaaaggttccaagaataataatattatcagcagtaggccaagataagattactcaacaggcaataactcttggtgcagattattatactgtaaaaccttttgacatggaagtatttacaaagagaatcagagaaatgtttaatagctctgcagcagttcaagaaacaaatatgagaaattcgtatgcatcatcaatgatatctactccaagtgaaaataaaacaaaggctcctattgatttagaaacggaaataactaatataatacatgaagttggagtaccagctcatattaaaggttacatgtatttgagagaagctataacaatggttgttaacgatatggaattattatcagcagtaactaaagagttatatccttcaattgctaaaaagtacaatacaacagcttcaagagttgaaagagcaataagacatgcaatagaagtagcatggggaagaggtcaaattgaggctattaacaggttatttggatatacagtgcataatgataaaggtaagccaacaaatagtgaatttatagctataatagctgataaattaagacttaaaaataaagttagctaattggcttgaagtaacatgaaaagctacgttgaagggaatggagaatatctttcatctatattttaatagcaactaatagtttttcatatcaattaatactctaaatttatgtaagactaataccttttattagttgggtgtaacaatctaactaataggaggttatttttatgccaaaaataaaaacaaaagattatagaggaaagcaacataaattaaccatcctttttaagtggaaaatttaaagcggacatgttataattaaagtgttagaatttaagatatagaaagacagaggattaaagtgtatggaaataaaaattaatattccagtattaaaaatattagcgataactatttcgggaatattgggttatataactggaataatagtatataaatagatatgatattttagactaaggagatataaatattctttggtcttttttttatgtaaaaaaataaattaattaacaaaaaggtcataatatttcaaaagtggattatagtatgcgaaaacataattctatggtatacaagcgttaataaaaagggaataagtatatttctattaaggaatatattacgatagtaagttattaacgacacaaaagtctatacaatgttataaatttacaatacatcatgtataaaaaagagaaaatgatgcttttaatgctgaaaaatgtggaaataaaagttaaaataaagattatagaaagaaggtatttgtataagaatgtagaaatatatgattaggtaaaagagattcgatcttgataagtatatcgagtcaatttaactaaaattatattatggaggtattataaaaaagagaatcaacttaagaataatttatgcattaatgaagggtggttttttatggaatttaattgggataagaaatggtcagtaggtattgataaaatagatcatcaacacaaagaattgtttgatagaattaataagttagtaagtgcgatgagagagggaaaaggaaaagatgaggttatagagactttaagctttctagaagagtacgttattaagcattttaatgatgaagaagagatgcaaagaaagagtaattatcctaaatacgatattcaacataagcaacatgaagaattcaaagaggagcttagagaattaagaaaagtttttgaaaaagctggtgtctcagcattatttgttataaatgtacaacagaagatgtccagttggtggagaaagcatattagagaattggatcgagatctaggaggattcttaatagaaagttctaaatagtactgtttactgaaggtatgatggaatcgaattatactacaagataaaaaatctaatcatttgaatttggtaaattattaagaaaaatcaatgaaaaggatagcttatttagaaatataagctatcttaaaattggttgacgatatttttttgaggtaaaaaaataatgaaaattgtttatattgatattataacttaagattgttacaggattatgacaaggctagtatataaattaattcttattaaattttaagtttatgaaaaaattgatttatattagaaaatatcgataacacagttttataaataaaaatcttatacagaataacataaatactgcagatttgaaaaagggattttatataatttatagaatatttttatttatagaaaaggggtgagggtatgggagaagtaaaagatgaaaagctaacaaaggatcaacaaaaagaagcattaaaaagcgcaataacaacaatagtagaaaactacaagatgttgctaataagtaataataatatatcaggcctagagaaacaaaaattatacggtgatcttgaacatagtgtggcagcaatagaatttataacacaatgtaagcttgataaaggtgttttatgggaaggaatatgaaactaatctaaataattagaatagatatagtgttattaaagtataattagtgcagcataaaaaatatttcacataacaaaaaagaatagttcactagggtgaaatgaactattcttatatgggtcatagtatttttaataggagtaaaataatgttttatcttgtttcaagtaatagtataaatatatattgtggcaatattatgacaacaataaaaaaactaatattaaaatttcaacaataatatttaaaaaaattgcacagaattgttgacaaaactcatgaatatatgatatttttgtaaaagcatacttttaatttagttcagagaagctaagaagggggaacatatgatgaataataaatcattaaaaagcgaaaaaaattttatagatgtaaaagagaaagtttctttaaagagagcaattccattaagtatccaacatttgtttgcaatgtttggagcttcagtcttagtaccacttatttttaaaattgatccaacaacagtgctattttttaatggtattggtacattactttatgcctttattactaaaaaaagtattccagcttatttaggatcaagttttgcctttatatcaccagtattacttttatatagtcaaggatatgattttcagactatacaaggcggttttgtatttgtaggtatatcattttcaataatagcgattattgttggatatacaggcatgggatggataaataaattatttccaccagctgctatgggatcaataataacaattataggtttagaattagccagtaatgcagcagatcaagcaggttttccggttggattaagtaattctccaactttaaacataacatgggtaattgtttcgatggttactttagctacagtgattttatgtaatatcttattaaaaggattcttgaaagttatacctatattaataggagtagtagttggatacataacagcattctttatgggattagtagattttagtactataaataatgcaaattattttgttttacctaatataaaggttgcacatttcaatttaaatgcaattttaactatactacctgcaacattcgtagtgattgcagagcatgttggtcatttaaaagttactagcagcattgttggaagagatttatcaaaagatcctggacttcatagatctttacttggagacgggctatcaactataatttcgggaatgtttggttctgtaccaacaacaacttatggtgaaaatataggagttttagctctaactaaagtgtatagtgtatatgtaatatgtggggccggcttagtatcaattttgctagggttttctgggaaaatgtcagcacttatcagcacaattccaacgcctgttattggaggaataagcttcttattatttggaactattgcaacttcaggattaagaacttttattgaagaaaaagttgatttttctaaatcaagaaatttaatattaacttcggtagtatttatagtaggattaagtggcataaaattaactttagggactattgaacttaaaggaatgggactagcaacagtagttgctatggtgttaagtataagttttatgatatttgataaattaggtataatgaacgaagcggaataagataaaagtttataaacaaggaaattaattataagaatgctgttagtattaatgaaaatactaatggcatttttttattttaaagaaaagaagtataaaattaaagaaagtagatatatttaactatttatatttttatagttaatttatgaatatataagagtattaaaagagaaactatgtatgaagataaatgtataggaggaatacaaatgaaattaaaaaaatacataaaagtattaagttattttattatttttaacgtacttataagtttggctttcgttggcgctgatgctaatactgtgaaaataactaccgataaggaaccattatatacagttgagtacgatggctatgatcttacagcgagaagaataagagttgctggaagcaacaatgttgcatattgcttagagataaatgaaaaatatccatctgggcaaaatttttcgtcaaatagtaatctaagtgaatcagttcgtaatgttattgctgccggatatccaaatagatctgtagctgaattaaatttagacaatgaaaacgaagcgtatttcgctactcagatagcaatatggagttcaatggaaggatatgatgttaataaaataaaaggaaataactctaaaatagtagatgcgataaagagcatatataatgatggagtaaatgggaaatattcaagtaaaataagaagtaaagtatataaaacaagtgatgaatctatacaagaaataatagttgtatatactgatgatttagtatcggaagaaaaaggagaatcaattcaaacagaatatgcaccacaagaaggataaataaaattacagattacatgttaatgctgttacataatgaatgttttatgattagtctaaagaatttaccttgtaacagcattaatagttaattagaaggaaatcttggctatgattgacaccaattctataaaatgataaccttttgttagattattagaagtagtaaggtggtgaagaagattgctgctaaaggattatagtaaggaacaaattaggaatttagttgaaattattaaagattgtgttcgtgaagatatgtatactatatctttagacgaaaataaggcggaaaatattcaatttatagaagaatacaatataaatgaaaagaagagaataagtatactatgtgatatagactacaaagatttttgttatggcctccaaaacgtaaaaaatggagttgagcaaaatgatctttacgtattttgtttacaaaaagaattgtataatgttgaggataagagagaaatagtagatatttatttgaaatttaatgtaatatgtaatgaagtgaatagtagtagagtattagtctctctacataaaagaaacaagcctattacatatctttttagataaaaagaattgtcttcatttctaaaaggagggataaactcatgaagaaatcagcattttgtgaatattgttttagcgaaagagaatatcaagtatataaagtaagaagaacatctatactaaaagaagaagaggtaagctacaaggctaaagaagctgtttgtaacgtttgtggtaatgagatttttgtgtcagacatatgtgagtataatttgatgaacttatataaagaatatagaaggaattataatattattagtacggatgaaatagaaaaagttaaaataaagtattcaattaattcagaagcactctcactaatattaggatggaatagtaagactatagaacgatatttagatggggatatgataggagtctccaatagtgatttattaagaaaagtatatgaaaataccagttattattctatcatattgcaaaataataaggaaagaataaatccagcagattacaataaaagtagacaagctattagatatattttggatcaagatgagacagaagaaaaaatcgacgcagtaataaaatatttgttgataagatgtgaagatttcacagctttatcaatccaaaaacttctatattatgtacaagcatttcattatgtctttactggtaattttatgtttgaagaagattgcgaagcttggaaggatggtccgttttatccaagtttatatgaaagatatgaacaatttggatatgaaaaaattaataaagatataatggctaatgataagttaaggttggagaattttgaacggaatattgtagaaagtataataaaattttatggttgttatagtggaaaaatattaaaggagatgactaaaagcgaagctccttggatattaacaagaactaattctattaatggaaagagtatcaaatatggtaaatttaatactgtgattgaaaaaagtttgatccaagagtattttaatagtattaaggaaaaatataatattagtagtttattagatatacaaaattatagtagagatttattcgataagatatctatttaatatgaagttaggaaagaggtaaattatgaaaactacattattacttattagacatggcgaaacagaatggaatgctttaggaaaatttcaagggtgtacagatatagagttatcagaggaaggaataaagcaagcgcaaatattaaaaaatagacttaatggagaatttgattggatatatgctagtccgttaagtagagcttttaaaacagcaaatatattagcatcaattacgaataaagaagttataatagaacctgagataagagaaattaattttggagaatgggaaggattgactgttaagcaaattagtgaaaaatatcctgatgtttttaaagcttggagaactgataaaaaagaaagttatatttgcggtggagattctagtatacgtaatgcggtaagtagagctaagaagtgtattcaagaaatagtatctaaacataaaggtgagaagatagtaattgttgctcatggaggaataataaaagctggacttataggaatatttgactgggatatgacaatgtatcataaagtagcacttggcaatacttgtattaataaaataactttcaatgatgatttaatgccaatgttagttagtttaaatgatacaactcatttagattaaattacggaagttatgcgaattaataaaaaaatgtaagtctataaaagaccccaaaatatactaaatgttaaacataaaataattattctaaataaatagataagatttattttaccaatgaagtttataaaattatcgtaaatgtattttacgatgattcataaggagtaaaaaagaatgatatacatgatgataagtattatattgattttatattctggaatgaattattacattagcatatggttttggaaaaatttatgtagtatgatccctttttttaatagtgaaatatactttagcttcttttttattatatttataataagcttagttggagttatatggaatcaccatctacctagatttctccaggatggaatttacttgatagcatcttattggcttgctgttatagtatactttgcaatatttattggggtgattgagtgcttttttattttaggcaagactttacagtttatacctagcgatattaaccttaacgcaaatgttttattttatattgctttgatagttctttttactgtaataattataattctatatggaacgataaatgctaaaaacgcaataattacaccatataatatagactaacctaaaaagtcaggaaagataagtaaattacaaatagcacttttatcagatattcatcttggtaatttaatggataaaagaatagataaactaattgataaaattaattctatacaaccagatattgttttaattgcaggagatataattgattctaatagagatatgataaattatgatttttctaagatgcaaagtaattttaaaaaaataaaaagtaaatatgggatttatgcatgtttggggaatcatgactatgatcataaaggtgattcatcaaatagaataaataatttcaaaaaagtaggagttaatatattacgagatagttatgtaaaaattgatgatagtttttatgttatagggcgtgaagatatctcttatgaaagaataagcgggataagaagaaaaaaactatcagaaactgtaaatgaaattagtggagaattacctataatagtgcttgatcatcagcccaataatttaaatgaacctatgagtgaaggaattgatttacaattatctggtcacacacataaaggacagttttttccttttaatttaataacgaaaagagtatttaaaattgattatgggtatctaaaaatggataaatttcgaataatagtttcatgtggcacaagaacttggggaccgcctataaggattgggagtaaatgtgagatagtaaatataaatgtaacatttaaataaaggattatttttagtggctataagtaattaaataaataaactatcatgaatcaaaaattaacaatgtctaaacttaaaaaatgcaaaaaaatatatgtcctaaaagcatacagtgtaataaaactgaacattttatttataaattgtatttttttaatacagtaaatttgcattagaaaaactatattgttaataattagattataaaatttcaataaatggggagatcaatctactaatatattttaaaaaatttatgtagatctataagttagaaccttgtatttataggcaaatatatcattatttgtattagtatgaaataaagattatgcgataaattataccagaatattacataagcttatataataaattgataaaataataacatttggcataaatattgctttacataattaatgtggttaaaagcaaataaatatgacagatgaattttaggaggtataaatttatggcacgttttactttacctagggacttgtatcatggagaaggggcacttgaagtacttaaaactttaaaaggcaaaaaagcttttgtagttgttggtggaggatcaatgaaaagatttggttttcttaaacaagttgaagattatttaacagaagcaggaatggaagtagaactatttgaaggagtagaaccagatccatcagtagaaacagtaatgaagggtgccgaagcaatgagaaacttcgagcctgattggatagttgctatgggtggaggatcaccaatagatgctgcaaaagctatgtggatattctatgaatacccagattttacttttgaacaagctgttgttccatttggtttaccagagcttagacaaaaagctaaatttgtagctattccatcaacaagtggtacagctacagaagttacagctttttcagttataacaaattacacagaaaagattaaatatcctttagctgattttaacataactccagatatagcaatagttgatccagtattagctcaaactatgccaaaaacattaacagctcatactggaatggatgcactaactcatgctatagaagcatatactgcatcgcttagatcaaatttttctgatcctttagcaattaaggcattgcaaatggtacaagaaaatttaatcaagtcttttgaaggagacaaggaagctagaaatctaatgcatgaagctcaatgtttagcaggaatggcattttctaatgcattacttggaatagttcattcaatggctcacaaggttggtgctgtattccatattcctcatggatgtgcgaatgctatattcttaccatatgtaattcaatataatagaacaaaatgcgaagatagatatgctgatattgctagagcattaaaattagaaggaaacacagattcagaattaactgattcattaattggaatgattaataaaatgaatagtgatttaaatattcctcattcaatgaaagaatatggagttactgaagaagattttaaagcaaatctttcattcattgctcataatgcagtgttagatgcatgtacaggatcaaatcctagagaaatagatgatgcgacaatggaaaaactatttgaatgcacatattatgggacaaaggttgaactatagtacttagatgtataaatgtaagaacataataataaaatgatatagttgtataaatcaatgttttgatttttgaaataaaaagctctcttttgagggctttttattatgaaaaaatttatagggaaattataatatttattgttatttttttgtttaaatgataaaattactttaatattaagaaaataacagttgctatgaaatgacttaaagtcacataatgtaatttgatgtaataaataaaggaatgtgattaattatttttattaaatattttagtagtttgcagctaatattacaaaagaccggttcaaacttgatagtttcaattggtctattattatattttaatagattaaatattaaacatctaaagattaaacgattaaattaagtttttaatgcttaaagggggactaaatatgattaataatttaaaagttaaacagaaaattttctcattttcggggataatgattttgctgatcatttttatgggggggattggatattattataatttacaatccaattatgatgtaacatctatgtataaagatagcttgcttccggtacagtggttaaatgataatagaaaccaatcaagagcaatagaagcagatacatataatattattctgaatataaaagataatgaagaacaaaataagaaattaaatgatattaaagatagagtaaaggcatatgataacaactggcaggcgtataaagaaactgagcttgaccaatttgaattagaaactataccattagttgagaacgatcttaaagaatatagagcagcaagagatgaaattataaaattggctatggatgggaagcaagaagaggctttagaaaattataaatcaataactgggaaagtagatgaatttcaaaaaaacttaaaggctttggcggtatataatgctgataaagcacaagaaataaatattcaaaataacaatagttttagttattctagaaagatttttataatactagttttcttgtcagtagtgatagcagctactttatcagttattatatctaaaacaattgctaacccattaaaattatcagtagagtgcattagagttttagctaagagagattttacagtatcagttcccgaactgcttttaaaacgaaaagatgaaatgggggatctagctaattcaatatttctaatgaaaaatgatattagcattttagtaaaggagataatggaaagatcacaagatatgaatgcttctagccaggaactttctgctactgtagaggaattaacaacgactatagagagtatagacgcatcaattagaaatatatcaaatgatatacaagaaacaagtgcatcatcggaagaaataagcgcatccattcaggaagtggattctaatattaatttactatcaggtaaagcaatggaaggaagcaataatgcaagtaaatccaaagaaagagctacagaagtacaaggtaaaggtaaagtgtcattagaggaagcgggaagattatatgaagaaaagagagaaaaagggtttaaagcaattgaatctgggaaagttgtagaagatataaaagcgatggcagatactatagctgatatatcagagcaaacaaacttacttgctcttaatgccgcaattgaagcagcaagagcaggagatcatggaaaaggttttgcggtagtagcagaagaagttaggaagttagcggaagaggcatctcaggctgttactattataaaagatacaatagtaaaagtacaagctgcgtttagaaatctttctgataataacgtagaagtattagattttataaaagaagatgtaaattctaaatttgaggatatgaagaatatggggaatcaatattatgatgatgcagaatttgtagcaaatatgtcagaggaaatagcttctatgtcagaggaacttacagcaacaattcatgaaataactaatgcagtacaaaatacagctgaaattgcacagaaatcatctgaaaacgctgaaacaataaaagatagtgtaagcgaaacaacaattgagatagagcagctagcgaaagctgcggagcagcaggctctgctagcagaaaagttaaatgaagtggtgaataaatttaagatataggcaattatagttaatagatttatttaaaagttatattatttaaaatgaagatagcactttcaagatgaagtgctattttttttataaactatttttcatttgatgaaagatctatcttatctaattaaattagtataagtttacaagtaaatcttttataatgatgtttacttaaattgtacataatttgtaattagaatgtaacaaaactgtgacaattattttctagaatgtaaatatagatttaaaagagtttataactcaacatttaatttataaaagatatttgaggtgataaatatgaatgataaaacagtttattctgttatagtacctttatataatgaggaacttgttataaatcaaagttataaaagacttaaagaagttatggattctacaaatgaaagttacgaaattgtatttgtgaatgatggaagtaaagatagaacaagagaaatagcagaagaaatatgtagcagagatgagaatataaaactcattaatttttcaagaaattttggtcaccaagcggctataactgcaggtatggatttagcattaggagatgcaattattgtaatagatgctgatctccaagatccaccagaagtaatgcttaaaatgattgaaaaatggaaagaaggttatgaagttgtctatggaaagagagtaaagagagaaggggaaaccttttttaaaaaatttacggcaagagtttattatagattattaagaagtatgacaacagttgacgttccagtagatgcaggggatttcagacttatagataggaaggtgtgcaatacattaatagctctgcctgaaaggaatagatatgtgcgaggactcgtgagttgggttggttataagcaaacctatgttgaatttataagacaggaaagatttgcaggagaaactaaatatcctctaaaaaagatgtttaagctggcatgtgatggtataacagcactatcatataaaccacttattattgcaggacattttgggattctagctttgctggttggaattattttaatgtttgttgatattacgaaagctataattaataaaagcagcgtgttgaattttactatgatgataggaattaacatgatgatgtttggagtagttttaagttgtattgggataatgggtcagtatattggaagaatatttgatgaaagtaaaggcaggccaatttatataatttctagtacaacaaattataacagatcaagtaaaaaatataatattattaatctagagaaaaagactttatagagggggaacaaatttgaagaaactaaaattaactaaagagaatataagtatatctttaattttaatattatctgcggtattgaattttgctaatataggaattgaaggatatgggaatagttattatgccgctggagtaaagagcatgactttgaatcttaaaaatttcttttttgtatccttcgatccagagagttttgttacaattgataaaccgccaatgggattctggatacaggccttatttgctaagatacttggatttaacggatggagtatattgttaccacaagcattagctggagtaatttcagtttatcttatatattttatagtgaaaagatcttttggaagtgccgctggacttatttcaggattatgtctctcagtaactccagtttttgtagcagcaagtagaaacaatacaatagataacttgcttgttctaacactgctctttgcatgcttagctcttacactagccgctgaaaaaggaaaagctaaatatctttatctaagtttaatacttgtcggaattggttttaatataaaaatgctggaagcatatatgattggaccagcaatttatataacatatcttctttcttcatctataacattaaaaaagagaatagttcatattgttataggcacatttgttcttctgtcagtatcattatcttgggctttaattgtagatttagttccagcacaaaatagaccttatattggtagtagtacagataatagtgttatggaacttatagttggtcacaatggattagaaagacttggaattggcagtaaatcaaataaaggatttaatgctagcaataataaaaaagatgatagacaaattcaaaataataatgaagtaagtaatgatcagaatcaacaaatgaataaagaaaattacaatggaagcactaatagaatggtaagtggagcaggaaatagggatggacaaggtgacggaagtatgcagaaagcatctaatgaaggaatgccaggtggaggcccaggaggacaaggtggacttcaaggtacctttggaggacagacaaaagcaggaatagcaagattattttctaaaaatagtttatctgatcaaataatttggtttttaccacttgcgttgttaggttttgtagctggtgctataaaagaaaaactaagattaaagttagataataaaagaaaaatatcactagcattatggattttatggttggtacctgaattcatatatttcagttacacaacaggtttattccatccatattatttaacaatgatggcacctccggctgcggcattagctggaataggaatagtaacaatgtggaaactatataatgaaaaaaaatgggcgtcatggttattaccaatatcattaattatagaaggtcttgttaatatgatgatgttatcttatttttcaaataatctatcagatagtataagaaaaataattttaatagccttgttattgtgttttttaacttcatcaatattagcaatattaaatttattgagctttattagaagaaaaaataatactaatttaagtgataataaggaaatgcatttgaaaaagatattgctaggaatttctatagttagtattttaactgtaccatttattggatcaagtgcagcaattactcatagtgtaaatagtactattcctactgctggattggaacttctttcaaacagtgaaagaggcggagcaagttttggcaaggaaagaagtgacaatggtaaaaattcgaagttacttgatttcttaaaaagtaatataacaactgaaaaatattcacttgtcgtaccatcatctcaaagcgctgatagtataataattcaaactggtgaaccagtgatggcacttggtggattttcaggatctgataagattctttctttagatgaatttaaagagatggttaagaatggagaagtgagatatgtactcactggtggcatgggcagaggcgaaagtagtgaaattctaaaatgggttgctgaaactggaacattagttccagaaagtcaatataaggatgttgtatcagatgatgaagcaaatattaaagacagtaacgatataaaaaataagtcaaaagatgataatcagaatgcaaattcagtaaggcagaatatggggggaccaggaggaaataactcagaacaattatatgatttaaaggatgaagcaaatattttaaaataagttttttacaataaaaagggcatgtattagtgcaagttattaagatttagctgcataaagactaaagagtttaactatttagtagttttagaactaattcttacagtttaatatttgcaataacaagcccttttttagtagaataaattcttaaaattttaaagaaaatgatcaatatatatgttgcaattcacaatgcacatttcataattcacaattacagctaaaattcttgaaatatttttagaattatgatgaagaattatttttgtaatatatatttaaaattctcgcaagccaaataatcgattaaggctagaatatagaaacttaattgcaacatatatttatatattgtgaaaggaaacaatagtgatgaatgaagtaaactttaagaagtatatatttagaataggtttgatttttatattattagtatcaatgttttctagcatttatgcggtaagaaactataaaagtattaatgttatagaacaaagtggtggattaaaaaaaatattaaatataagggatggcgaaaatttaccagataacataccttcattaaacaatagtggatctaatttagaaaataatgagatcaaaaatgataatggccaatatgattctaatggaatagtttcacgaaatgctgattctattgagaaaggaatgaatgataaatcgcagcaagatggaagtgtagggataaatggaggtcgtgatactaaatttggatctaatagtaaacaaagaggaaataataaaaatgctaagcaaggggaggtaaatggcaatattcaaagagggggagtggatgatagatatcttttaagtatcactatatattcagtattatttttaattggatcatgtagcgcttactgtttaattaaacgaaaaaatataaaatttaattataaagatgaaaaactcataataattatattaatatttacaggaatttttctgagaatctcagcttccacacttgtaaatggacataatgatatcaatttattcaaaaattgggcagaaactgcggcaaacggtttttcgcaattttatgctaatgctagacaagccgattatccacctgtatatatatacatattagggtgcataggaaaaattgcaaatatacaagtatttaattcttattatatattattacttaaaattccatctataatagcagatgttgcgacagcttattttatatatagaattggaaaaaggtttttaaatatagtaactagtatctttttagctacattttacatctttaatccagcaatttttatagattctacattttggggacaagttgattctttatttacattacttattgttatttcgatatatctgttatatgaaaaaaaatatgtatcttcatcagtgatgtttgcattatctgtacttatgaaaccacagggaattatatttattccagtacttttctttgaattagttagacaaagaaaaattagaaattttatatatgctgcagttgcagcggtagcaactgtaattgtgattataattcctttttcagtaaacgaacaaagtccaacttggatttttaatctctatttaaagacaatatcagaatatccatatgcttctgtaaatgcgttcaatttttttggtttagtaggggcaaattataaaaatgataatactacattttttatatttagctatcatacaattggaattatgtttataattctaacaactttaattggctggattatatatataaaagggaatgatagaaagtatatttcagcaatatccttacttcaaattgcaggagtatttacgttttcggttggaatgcacgaaagatacttatttccagcggtagcattatcaattttagcatttatatattcaaaagacaggagattttttataatggctattgggtttagtattactagctatatcaacatctccacggttttcttcaaaacaaatacatcaattttcgagattttattgaaagtaacttcattatttaatgtaatattagttttatatttagtaaaagttattatagataacactgttaaaaaattttctttaaaaatcgataataaggagagtgaattgttatgaacgtaagaaaagctgtaatacctgcagctggccttggaactaggtttttgccagcaactaaagcccagccaaaagaaatgttacctatagtagataaacctactatccaatatatagtagaagaagcagttgaatctggcattgaggaaatacttataataacagggagaaataaacgggctatagaagatcattttgataaatctgtagagcttgaagatgagcttgagaatagtaaaaaagacgagttgcttaagatggtacaaagtatatctaatatggtagatatttactatacacgtcaaaaagaacccaaaggacttggagatgcaataagtcatgctaaaaattttgttggaaatgaaccttttgcagtaatgcttggtgatgatatagttgataatgaagttccatgcttaaaacaattgataaattgctacgataaatataagacttcagtattaggcgttcaagaaatctctgaatgtaatataccgaaatatggaataataaaagggatagagattgatgaaggactttataaggttagtgatatggtagaaaagcc

(The sequence listing continues in the following parts.)

1-52. (canceled)

53. A composition comprising, a recombinant, or chemically synthesized peptide whereby the peptide binds to one or more quorum sensing regulatory proteins of Clostridium acetobutylicum, and modifies the differentiated state of the Clostridium acetobutylicum in culture.

54. The composition of claim 53, whereby one or more quorum sensing regulatory proteins are selected from the group consisting of SEQ ID NO:17, SEQ ID NO:18, SEQ ID NO:19, SEQ ID NO:20, SEQ ID NO:21, SEQ ID NO:22, SEQ ID NO:23, SEQ ID NO:24, SEQ ID NO:25, SEQ ID NO:26, SEQ ID NO:27, SEQ ID NO:28, SEQ ID NO:29, SEQ ID NO:30, SEQ ID NO:31, SEQ ID NO:32, SEQ ID NO:33, SEQ ID NO:34, SEQ ID NO:35, SEQ ID NO:36, SEQ ID NO:37, SEQ ID NO:38, SEQ ID NO:39, SEQ ID NO:40, SEQ ID NO:41, SEQ ID NO:42, SEQ ID NO:43, SEQ ID NO:44, SEQ ID NO:45, SEQ ID NO:46, SEQ ID NO:47, SEQ ID NO:48, SEQ ID NO:49, SEQ ID NO:50, SEQ ID NO:51, SEQ ID NO:52, SEQ ID NO:53, SEQ ID NO:54, SEQ ID NO:55, SEQ ID NO:56, SEQ ID NO:57, SEQ ID NO:58, SEQ ID NO:59, SEQ ID NO:60, SEQ ID NO:61, and SEQ ID NO:62,

55. The composition of claim 53, whereby the recombinant or chemically synthesized peptide consists of an amino acid sequence at lest 90 percent identical to a sequence in selected from the group consisting of SEQ ID NO:143, SEQ ID NO:144, SEQ ID NO:145, SEQ ID NO:146, SEQ ID NO:147, and SEQ ID NO:148.

56. The composition of claim 53, whereby the recombinant or chemically synthesized peptide consists of an amino acid sequence set forth in SEQ ID NO:143, and conservatively substituted variants thereof.

57. (canceled)

58. The composition of claim 53, whereby the recombinant or chemically synthesized peptide consists of an amino acid sequence set forth in SEQ ID NO:143.

59. The composition of claim 53, whereby the recombinant or chemically synthesized peptide consists of an amino acid sequence set forth in SEQ ID NO:144, and conservatively substituted variants thereof.

60. The composition of claim 53, whereby the recombinant or chemically synthesized peptide consists of a peptide with an amino acid sequence set forth in SEQ ID NO:144.

61. The composition of claim 53, whereby the recombinant or chemical synthesized peptide consists of an amino acid sequence at lest 90 percent identical to the sequence set forth in SEQ ID NO: 146.

62. (canceled)

63. The composition of claim 53, further comprising media capable of sustaining Clostridium acetobutylicum in culture.

64. The composition of claim 53, whereby the amount of peptide is equal to an effective amount.

65. The composition of claim 53, whereby the Clostridium acetobutylicum consists of Clostridium acetobutylicum ATCC 824.

66. The composition of claim 53, whereby the differentiated state is extended serial propagation.

67. A method for directing or maintaining the differentiated state of a culture of Clostridium acetobutylicum comprising, culturing the Clostridium acetobutylicum in a media comprising an effective amount of the peptide of claim 53.

68. The method of claim 67, whereby the peptide is 90 percent identical to the sequence selected from the group consisting of SEQ ID NO:143, SEQ ID NO:144, SEQ ID NO:145, SEQ ID NO:146, SEQ ID NO:147, and SEQ ID NO:148.

69. A method for directing or maintaining the differentiated state of Clostridium acetobutylicum in culture, comprising modifying the activity of one or more quorum sensing regulatory proteins.

70. The method of claim 69 whereby one or more quorum sensing regulatory proteins are selected from the group consisting of SEQ ID NO:17, SEQ ID NO:18, SEQ ID NO:19, SEQ ID NO:20, SEQ ID NO:21, SEQ ID NO:22, SEQ ID NO:23, SEQ ID NO:24, SEQ ID NO:25, SEQ ID NO:26, SEQ ID NO:27, SEQ ID NO:28, SEQ ID NO:29, SEQ ID NO:30, SEQ ID NO:31, SEQ ID NO:32, SEQ ID NO:33, SEQ ID NO:34, SEQ ID NO:35, SEQ ID NO:36, SEQ ID NO:37, SEQ ID NO:38, SEQ ID NO:39, SEQ ID NO:40, SEQ ID NO:41, SEQ ID NO:42, SEQ ID NO:43, SEQ ID NO:44, SEQ ID NO:45, SEQ ID NO:46, SEQ ID NO:47, SEQ ID NO:48, SEQ ID NO:49, SEQ ID NO:50, SEQ ID NO:51, SEQ ID NO:52, SEQ ID NO:53, SEQ ID NO:54, SEQ ID NO:55, SEQ ID NO:56, SEQ ID NO:57, SEQ ID NO:58, SEQ ID NO:59, SEQ ID NO:60, SEQ ID NO:61, and SEQ ID NO:62.

71. The method of claim 69 whereby modifying the activity of one or more quorum sensing regulatory proteins comprises reducing or eliminating the activity through genetic engineering of the Clostridium acetobutylicum.

72. (canceled)

73. The method of claim 67, whereby the peptide consisting of SEQ ID NO:143, and conservatively substituted variants thereof.

74. (canceled)

75. (canceled)
